United States Patent Application Publication US 2022/0008368 A1 - sequence listing, part 15

SEQ ID NO: 2 - DNA, 58617616 bp, Homo sapiens (residues 30,394,323-32,565,345 of 58,617,616)
  modified_base (1)..(60000): a, c, t, g, unknown or other
  modified_base (24448981)..(24498980): a, c, t, g, unknown or other
  modified_base (24552653)..(24552752): a, c, t, g, unknown or other
  modified_base (24891257)..(24891356): a, c, t, g, unknown or other
  modified_base (24895791)..(24895890): a, c, t, g, unknown or other
  modified_base (24898314)..(24904771): a, c, t, g, unknown or other
  modified_base (24908590)..(24908689): a, c, t, g, unknown or other
  modified_base (27190875)..(27240874): a, c, t, g, unknown or other
  modified_base (58607617)..(58617616): a, c, t, g, unknown or other
aattgtgtgtgcaaatgggtagttaggtatctaactatgatagtgcatgtgtgggtatgtaattactagatttgcatttgcaaatgctcatttccctaaacagccctctccccactcccacttctcagctaccctcctaccccacaacacacacatacccaggtgtaggactgggccaggtgcatctcttacgtctgctcggctgcaccagaggaagctccttcttcagcgtcccttccccattctatgcaccaccatgccctccacactgagaggaagaaaccagtgacatggccctgtcttcttccatctctggtggtaattgtttgccccacctgtaaatagtacagtctggaaattacacatgagcagttgcttttctactcccagttcagcctcacctttccaagggagaatcaccatttatgaactggacttacacaatctagtgtgcaagtaagctgcacactgagctgagctcaagagaaaagttgaggtgacaccatggaggccttgatgaaggattttaggctttacctgaaaagcagtgggtaagccatcatgccatgtgaagggttgtttaaggggtcaaccccttaacactggttttggagcactggtttcggagtcttgcacatctgcttcccctttcagcttgtgagctcggttactcctgaaaataaatgtaatgtgtattcagggtttagtgtaatccttatttgcattaatgcatttgtgcttcatgtcattgtactgaatgaagttctagtcttcttagggctttcgttgtgtacaaagggacaatgcttagattaatcttaattgctaccaattttcatcttatctatggtacaagattaatgaaaagtgataaaagaaggaactgacaggacaggtagtttatgactctaaaatcagatagtctacaaacagacaaggtgtcattttgggtaccataaaggggatgtccaataactagaacatagaagtggcattttgttgttttgtttgcagtatctacagtcaaacacctaagacacacatctggtttggggtggaccagttgcagtttaacgttaaaacccagccctgctggtggatgtagaatgctggtctgaatgtgtcagagtgattggttaagaactgtgcctcctgcaggaagatgactcagggtcacccagaccttggtttatctgccaaagaagggccaccaggatgccttttctggggaggttccatatgttgcgcctaaatgtctcagtgattggattttagtggcatgttctcttctgacaacaagctttgcttctgccatgttgaaatgcaaccttaatagctgtgtacctcttcatgtggctgagtctgagaggcagcaaaagatctacctttctccataatttttgtttagtaaggactttttatcactttaatgcaagttaagctttgttttgaatataagacttatgataactaggtcagttacatttttgttttcattatgttttttaagttaataaacttgattttttaagagcagttttaggtttgcagcaaaattgagtgggaagtacaaaggctcatccccacaattcctcgctattaacatcccccactacatcagtacaattgttaccactgatgaactacattgacacgtcaatatcacccgaagtccatgtttacattagggtgcacttggcgtacattctgtgggttctgacaaatgtatcatgacatgtatccaccattgcagtatcatacagaatcttctccctgccctaaaactcctctctgctctgcctacttcattatgttgtaaaaaaaatgacttctcaccaaataacaaatgccagtcaccaaaaatcccagccttttatttaagcagagggttgattggtacctctctccatctcctgatgggataattttgcctgtagatgggaatttggaatggagaatctctttcaaataagagatcacatgatctgtgttctagagtctataaaataaccaattgaaaaggaagtgtccaacttgacttatattttctggatcaatttgactttctgggaatttggggtttacttttgcttttggcaatttctttagatttgtctcttccatccatctttctttgagaagcttgatgcagacctgccaattgttacagtgtagcagtttcagggaagagagtaaggaagtgattctaaggacaggaggagctttctacagatgtgtcctgcctccatttgctatgagagggctctctcttttttttttttttttttttgagacaaagtctctctctgtcgcccaggctggagtgccactgtagtggcatgatctcggctcactgcaacctctgccccgccgccaggttcaagtgattctcctgcctcagtctcccgagtagctgagattacaggcatgcaccaccatgcctggctaatttttgtatttttagtagagacggggtttcaccatgctggccaggctcgtctcgaactcctgacctcaggtgatctgcccgccttggcctcccaaagtgctgggattacaggcgtgaaccaccgtgcccagccaagcaggctctcttttaaagggcttcctgacctcaggccagctaggcacctccaccttcctgcaaacctcttcttacactccagctttttgctagagcccagagctcccagttggcccttccacatcctataactctatggctgcaaacctgggcacttaatacttgttagaacttgttacttcaggtcttggataatagaggctggggtgacaatggttgtggcttgagactcaggtgataggaaaagctgtacctgtccctgagtttgtgttcttaatctcatgattcgttaacagatggtgttcaatgtctaaagccacctttgcattataaatgggagaattttgctggaaagactctctctggcatgaggactctccacctagccctcatcttttgttcattttgtcaaacaaatctacatgtgttaaaattgcaaagaactaaatacacacaccacactcacagatgagtgcatgtgaaactggtgaagtctgggtaaagctggagggatgtatcaacgttagtttcctggctgtgatgccaaactatctatcattattcaggatattactattgggagaaactgggtgatgagtagacaagattcctcagttatttcttacaactgagtgtgaatctacaattatctcaagacaaaaagcttaaaaaaactcagcttttacttctttgttttatattgccatttccaccatactccttacagtttggtgttctgtggattctttactaatctgcctcgtttatttaaatgttaattggcgtctgttaatttgatttcagtactagaagccaaactcaacaataagaccccttaatgattacaaggtattagagcttggacaagggggtctgaaaagaccctcatccctacaagaaagtaaccagtgttcagaaataaataggcatgagagagatagaaggagagagagaaagagagaataccctaacagaaagaatgactgattggcaaatttaagagctcacaaaacagaccaggtctaggatgttagaaagtacaaacagaaaatagcccatgattttaaacattaattctttagtttctttttcccttttaaattttgaaataattatagattgataagaagttgcaaagatagtatggagaggtctttggttttccccattgcttgcatcttcgataactgtagtgctgcataatagcaaaagcaggaaaccaacatcactacaatgtacctggccacttctgtgtcatttgatcacgtctgtagattccgtaaccactgcctttattatgacacagaagtgctcttcaccacaagatctccctcatctacccatttccagttatatcccctccgtgccccaaccatccctagcccttggtgcctacccatctgtttaattttctcaatttgggaatgttgtataaatggaaccatatggtatatgacctttggcattggctttttctttttcttttttttttttaaattatagtttaagttatagggtacatgtgcagaatgtgcagttttgttacataggtatacacacgccatggtggtttgctgcacccatcaactcgtcacctgcatgagatatttctcctaatgctatccctcccctagcctcgcaatcccggacaggccccagtgtgtgatgttcccctccctgtgtccatgtgttctcattgttcagctcccacttatgagtgagaacatgcggtgtttggttttctgttcttctgttagtttgctgagaatgatggttttcagcttcatccatgtccctgcaaaggacatgatcatccatgtccctgcaaaggacatgaaattatccttttttatggctgcatagtattccatggtgtatatgtgccacattttctttatccagtctatcattgatgggcatttgggttggttccaagtctttgctattgtgaatagtgctgcaataaacatatgtgtgcatgtctctttatagtagaatgatttataatcctttgggtgtatatccagtagtgggattgctgggtcaaatgggatttctagttctagatccttgaggaatcgccacactgtcttccacaatgattgaactaatttacactcccaccaacagtgtaaaagcattcctatttctccacatgctctctaacgtgtgttgtttcctgactttttaatgattgccattctaactggcgtgagatggtatctcattgtggttttgatttgcatttctctgatgaccagtgatgatgagctttttttcatatgtttgtcagctgcataaatgtcttctttcgagaagtgtctgttcatatccttcacccactttttcatggggttgtttttttttcttgtaattttgtttaagttctttgtagattctgcctattagccctttgtcagatggatagattgcaaaaattttctcccattctgtaggttgcctgttcactctgatgatagtttcttttgctgtgcagaagctctttagtttaattagatcccatttgtcaattttggcttttgttgccattgcttttggtattttagacatgaagtctttgcccatgcttatgtcctgaatggtattgcctaggttttcttctaggatttttatggttttaggtcttaagtttaaatttttaatccatcttgagttaatttttgtataaggtataaggaaggagtccagtttcagttttctgcatatgtctagctagccagttttcccaacaccatttattaaataagaaatgttttttttttttttttttgagatggagttttgctctgtcacctagtcacccaggctggagtgcagtggtgtgatcttggcacactgcaatctccgcctcccgggttcaagcgattctcctgcctcagcctcccaagtagctgggattacaggcgcccaccaccatgcccagctcaattttgtatttgtggtagagacgggatttcaccatgttggttaggctggtcttgaactcctgacctcaagcagtccaccttcctaggcctcccaaactgctgggattacaggcgtgagccaccgcacccagccttggcattggctttttaaaattcagcataatgcccttgagcgccatctatgttttgcatgtattaagaattcattcctttatatttctgagtagcacctcatggcatagatgtaccacaattcatttcactattctcctattgtaggacttttttttttttccagaatttggctgttatagccaaaatttctgtgaacaatggcatacaggtttttgggtgaacgtaagtttatttttctaatataagggctcagaagtgcaattgttagatcgtatggtaagggtatgttttattttttattttttaagaaaatgtcaaagttttccagagtggctgtaccatcctacatttgtaccagcaatgcatgagagatcaggttgtttgcatcctcagcagcatttagtatcgtcattttgaacagaattttaactgttttaatcagtatgtagtgttatgttcctgaacatattttcatgtgtttatttgctattcatatctcttttttggtgaaatatctggccatgtcttttgcctgttttctaattatattatttattgagttgagttttgaggggttttgttttgttgttgagacaaggtctcactttgtcgcccaggctgcagtgcagtggtgctgtcatagctcattgcagccttcaactcctggcctcaagtgatcctcccacttcagcctcctaagtgagcagatgagactacaggtgtgagctaccatgcctggcctgagagttctttctacatattagatatgagtctttggtcagatacatggtttgcaaacattttcccctagtctgtagcttgtctttttatcttcttagcagggttttctgcagagcaaaaaatttaattttgacaaaatccaatttattaatttttccttttgtgaattttacttccggtatcatatttaagaaccatttgcccaggacctaggttcctatgatttttttcctatattatcttctaaaagtttcatagttttatgctttatatttacatttgtaatccatgttttgtgtaagatatgagatttaggtcaaggttctctttttgttgttgttgttgtttgtttatagatatccagttgttctagctccatttgctgcaaaaaactctccttccttcatggaattgcttttgcatccttgtcaaaaatcaattggccttacctgtgtggggggctacttctgagttgtccattctgttccattgatctatctattttttttcttttacgagatggagtctcactctgtcacctaggttggagctcactgtagcctggaattcctgggctccagctatcctcctgcttcagtctggtctacatatcttgatatttgagaataagaaagaaggacttcaagatccgggttagactccccatgtcccagtacctctggcctccaccaagaatggatgtgagcactggaactgggctcaccaccccagtggggtttgctctgcacaggagcacgtgtgaaggactttacccactgctttctctaccacattccccagacactactgttttgggtctcttttcatttcttttccttgcttacacatgttctcagattaaagtgggattttctgaaacagattttttctataatggggtaaaaaccgtaagtaaacagaattatcataaccatttaaatagtaataaaatatgtttttctatttctattcaaagagggggaaaggtaactggagaagatgaaaggaaaagctagatttgtgggtggtaggtgtgttttcttcttcttcaacaacaggtacagagttttagtaaaggacttcaagggaaaaggaaaaaaatagcatatactgttatggggttatttttatctttcatttttgtgacaacttatttgtacttaagagaatctttccaaagagttagaagcatcattaaataaagactgtgaaatgtgcaatatggcttatttatttaaatgttaattggtccaacgaacacttctaattagctctatatttgcttagcaaaaagttttacaaattccaattgtgaaaagcagctattttgagctggtaagcatgttgcagcctcagctatgatttttctatagttctcagcccttgaaggcacaatttaatttttcatgtatgcatactagcaacggtaaacacttgcgagtgtaaagaaccttctttaattagctgcacaacaattaaaggattcacaaactaaattgaaccctgtctcggtgcttactagctgaattctaccacctgtcacaacagcactttgttcaatctgttatgcaaaatcattatagcaatatagtggaggggaaaaaaaaagagaaaacagcaattatttcttacttttctcttgaatgggttattttgggttatactgatgtcaggttcattgaagctaaccttttgaaatctgtaacagcataatacttctaaggcagtctcagaatggctggaagaatattccattttacgcttttaggaggaagcagcattcatttctttcctcctaaaagtgctggagactctgatcatttgaaacaacctgttctacctctcccagccaccttccatttgccttttttcaccgggaaccctgtacggctcgacaggcttctgtgttttaaaagcttgcaaaccgcggccgacgtgggtttaaagatgcaattctcaaactgccgcctccagagcatctcgagtcatattacttcataagcccagtgacttactgtaaaaacatgtgtgttgcttgctttttaaacattttttaaaattaaaaaatatatatatatatatatatatatataattttcaaaaatttgatttaaactaaactgctctcctgtttagactgggtcggaggggaatgttacccccaccccaccctggccatttgcagagacaaaggctttattgtgaggcccaaacccaaagcctgacatgacagacttctccctggagtcaaggaataaatgtttacatttggtgttgccgtgccctggccccctggtaggaatgcctgcaactctgggctttcacatacagaagggatggggagggatgctttgcggaggagaacaccgctgctgacgagctgcactttgagatgctgcctggcattgcttaaaatggcatcaataacatattgttagtcccagcctccaaagcatatgtgatctggccatttcagacgtcggagtgactgtagacaaaccgctgagctcagtcagagggtctgcattctcccacattacaatattttttataagttgttctttacatcatttcaggaaaatgcacaacgcagacaaggcaggcctttgaaaatctaaactctttccctgaaaaaatgctgaaaggaggaaagtgagagccaaaggtcaaaggctgcgcaagaatgtgtttctctatttttcctatttcttaagcagaggaaactgtcatcgttgtggcatttgggtaagaaggactatctccaatcaggtccaggagggagaatttgaagtctacaggggcttctctcttctttctgctgaaatccaactctttggctggtccagggctagtgcatggaaactaaagtgagctgctatccgctttattgaagttggtgaaatgcatacctcctgcaaacttgcagctctagaaagaagacccacttgctgtcttccacagcctccctgtctgctgctgcactcggctgcagttttattgccagagtctccaagtgcaaggtccagctgctctttgtccctgggcatgctgtccccctcgttcttcctgtgctcttgacaacggtgtctgcaccaggcttttgatgggaggctgctgttgccttcagggatgggatggtcacatagtaggctctcagtgaacatctggtgatgaccgtaaatgtaatctccacttggccgaagaactcatgggaattgaagggtggattcaggcaatttaagcccttcagcattcccctctacatttttttctttcctttcctttcctcttttttttttttttttttttctgctgttcatttagaatctcctcatcacggtgcactatttgttccatcccacgtttcttattgctagtcttgcaagggaagatggtaggtagaagaactgtagcgtaaggccagcgttgcccacgcagggcctgcctaccttgtgctcagacctgggttgggcacaaagggggccatcctgccttcaagaggcttctagtctgggcgcagagcccagactccccaaggaaatgtggagacagccttggtgtagattctgtatttggggcaggccagagggggacactgttttctggcaccccagcatccctggaactccagcatcctcaactgcaggccacttgaggtagtgatggcttagcagtgaggcgcatggcatgtggagacaggcagtctggggttcagtcccagcaatctagtgatcagatgtgaaactttaggcaagttatttaacctctctgtgcctcagtttcctcaaccataaaacgaatatgatagtagtaaaactcactgatagagtttgagaattatgtgaaggcacttagaacaggactgagtgcccaggaagtaccacgttagttaccattgctgtttgtttctagaaaactctccaaccatgattttcctcttctcttatactacaaccacagtcatcaacacagaagaagacttctgtgaccaaatgtccggaggcgggggggctcctcaacacacccagcagtggacaccagctgggtgtccccaattcaattctgccaccatctacccagagatcccacaggttgcgagctcagtccccaagacggtcctgccccaggcaccagttgcaagtccaggcctcacgaacttctgaccaacaggcttcacgttggggttcccatgaccccctctttgggtcctattaatttgccggagcagctcatggaaacatttacttatgtttaccagtttattatcaacaatattacaaaggatgtgggtgaagagaggcgtaggggaatgtatggggcatggtggggagcttccacgccttccctgggcaccactgtccgggaacctcaaggcattcagctatcccgaagctcccagaacccagtcctcttgggtttttagggaagcttcatgatgtcatacatatccttcagaatatagggtgagaccctctttggggagggtcttaagaccccaagtcagaaagatgggggaagattagagtcctgccttggggcaggtgaaaggaggtcagaaaaagatcagaaatattctgtttcctgaggcctaatactgccaacattacaacaaaagactctgacagggaccatgggagttatgagccaggaactgcagacaaaacctatgtatatataataacaccgcactgctacttcctgaacttggggtctccctgtgcctgaactccataggttctgagattcaacagaaccttaggaaaccatctcctagctcctggcttcaggcttgatgggtctgatgagccatcagaccagagtcttccagggaaagcttctccatgggtaccaaaccatttaagactgcacttctcccttgcctcttgatactgtttatgggcgcagtgttgtagtctagaaggtggattttcagaaccggtgtgatcagtcgccacacccgaatcgttttccacctttgcatcctgcctactggaaattggattacttactgaagaatgtggaggcccttgatgcagaggcactgttaacatttttttttttttttgagatagagtctcactctgtatcccaggttggagtgcactggcacaatctccactcactgcaacctccacctcctgggttcaagcgattctcctgcctcagcctcccgagtagctgggattacaggcacccgccaacacacccagataatttttgtatttttcgtagagacgggatttaccatgttgtccaagctggtcttaaactcctgacctcaggagatccacccaccttggcctcccaaagtggtgggattacaggcgtgagccaccacgcccagccactgtttctatcttatcagacctgaaggatctctaaagtcaggagttcctgagtatcttccatgctagaagtatgtgcattgttccatgtgcagggcacatgggagagacacaatcattgttaacatatgaatttatagcctagcaggggcaccaagaaaagggaacaactagtcaaccgcgatgcatgcccagggagaaacaacccaaggaagaggagtgggagacgagagagcggagtgtggttaaggactaggaaaggatcaggagcaggtgccaccgagcaagaatcttaatttgccatggtcatgggttggggaaggttctgaaggtgttttctttgaaatccacaccgctttactccaggccaacagggattttggccaggagactgcaggctgatgtaggagagctctgctgttggggaaggatacattgtagggctataaatacctgagataggaaatgcgtatttttagctccaagcattgaggaaacttggattatctagcagtgattggggtcatctcccagctctgtttctacactgggaaactgtacggccagttttccttttaagggttgagcaacgtgccggggctggcacagcttggtgcctgacacagagtgacccctggagactgtctgtggaatgactgtgtgacagcctccagtgaacaagttttctgtagcgggtgtgctcctttaaagcaggggccaccacaacttgttggcatttccctgggtgttgctatcatgtcagtttctcatggtgataaccttttaaaagatgtttgatccctaaacagtgtagaaagagatgcgagcagaggagatccacagagtagacagagggcatccccaacctctgttgtctctgctttggaccctggactgactgcaatcatgtcgggtcccaccagttactttaatgaggggggattttgcttttgcagaagttgctgcctttcttgtgcctgttactttgctcacttattactggggtcacagcaggtggctggataaaggatcaccggaaccagggagccagccctacaactccactttgctcctccctgacctaccctgtcctgtgtggccaacagactgaccttatgatccccagaaggctgaaaaatctacaaaggatgtttcttcctttttgtttatattgacgttttgctagtttttctaaacattacataatgagctgatttcaaaatcagcttgctgtttcgagaaaactctccaaccatgattttcctcttctctcacactacaactatagtcatcaacatagaagaagacttctgtgaccaaatgtcagggtggggggctccccacacacccagcagtggacaccagctgggtgtcccccaattcaattctgccaccatctacccggagatcccacagggtgagagctcagtccccaagatggtcccgccccagacgacagtcacaagccggggcctcacgaacttctgaccaacaggcttcactttggggtttccaaaatcccctgtttgtgttctgagcagcaggaagggaatggacatccctgggtgatcaccaagatgagttctttgctgtctctcctttcaggcccttatgcatatatattctctctttttgttgttgtacataaagtggattatgcttgcataccattttgtgaacagccactgaatttaatgtattcttctgcacccttcttgatgagtgcaaaaacaattgcatgactctaccatgattgatttatttaatccagtcccgtgggtggaaatacagatggtttccaattttctttttctctcattagatctggggactgggctccttgtctttggctcacagaggatgactggggtttcctttgttgagaggaaagtggccgtcatgaaatcagttgggttttctctgatgtgatgggcactatgagtacctgccttggcccactcatcaccaaccctgaaggggtctcaggcatatacttttggattggaggtgggttatgagaaagatgggctgtgtttctttttgtgtgagtggatgcatgtacctgtgcacgagtacatgtgtgcacagaggtgtagaggaagttcaacctgttttttgctttgggtttgtggtgattgaatccaggccattatagaccatggggagaagggtggaaatctgggtgttgcattctagtaaaattggccactagtataattgccctaaccttctgagtgtctgctcacgggtgttaagcatttgtctgtaccatttttgattagtgcatggtatccaggggatgcccttgtgagccagcctcccctccccatcaccacctttgttccttgagcttctttccttcagtactccatctgcattatttgtccaggccacagccttttctccaggaattagaaagtcatcactgttttctactgccattcaatcttcttgacctctggtgagagttgtgagctgctctctctgccaatttcagcagctgggagggatattggtgagggcacaggaagtaagtggaagaagggtatcaaggtggtcacatcgcagttgcaatctgcttttgttttattcctttggttgttagtaattagttattcatccatccatatgtccatccatccatcagccatcattgatccatcggtccatctgtccatcatccatccatctatccttccatctattcatacatctatccttccatctattcatccatccattattctctatcatccatccatctatatattcatccatcctccatccatcgatcttctatccatccttcatctatcatcatccatctattcatctgtctattcatccattcatccatccactcatccattcatccatctatccacccacaaatccatcattcattcattcattcattatcatccattggtccatccatccatccatccatccatccatccactcattcatccatccatccactcatccatccatccatccatccacccacaaatccatcattaatccattatcatccattcgtctattcatccatccattgatccattcatccatctatccatatctttctatctaaacattcatctctggtatgtagaatggtgtctggcatagagtagttgctcaataaatatttgttgaataaatgaatgaataaataaataaaagtcagaggttttgaacttggagagtgtatttcctgccaatagtctgcagcaggcctatgagattcagaccaccttgttctgctaaaggacatctcaagcctcgctaatcttacagagctctcttttcttatgttgttatccttgggaggcgccctgtctaattttctccttccgaatccctggcccccctgctcccagcttccttggcagcagacaaggaagaagggcaatctaggtgtacttttataaatgacactttgatgaacatcatttcagctaaatctttgtacacgttcttaattatttccttaggtttaattgctagaagtggaattgccaggttaaagagaatgcacatttaaagatttgaatacctgttgccaaattgcccttcaggcatgttatgtcaaattacgtcccccgaccaccacaactgccatacaaattatgaccctgtccctttccttatattccttcaagtctgaatgttatttaacaaagtggtacaccgtactaattttatatgcaaactgtctcattttgctttttatttctcaagcttaatatgtatgtatatctatattttatgtagatatctctctatatagatgtaaagatacatatctttaatggaatgcctctaagtccctttggtgaattacctgtttatgccttctgtctggtttccttttgggtatttgaatttttttttttaactgtagcatctcttcatacatcagagatattaaccctttgtcttatacacatcttctaattgtttcttcgaagtatttcacttggaaaaatagttcgtacatggtgttttctaatgagataaagggatttaagtgattaaatcttttaatgtattcctttactttttagtgccatgctttgaaaatgatttcctaccccattaataatactcctaaattcaccttaagtatttatgattttattttaaatataaatttctaatccattaagtgcttattttgatgtatatccttagggtaaaattttgtattcacacattgcacacatattcataattttctattaaagagattttaaaattacattttccaactgatatataagatatataggaaaactccatttactttttgttctttgaaatttataaataaaataactttaaaaaattatttgaaataaataaacaatgaaaagtgaaggtctttttttttttttttttttttttttttgagacggagtctcgctctgtcgcccaggctggagtgcagtggcgcgatctcggctcactgcaagctccgcctcccgggttcacgccattctcctgcctcagcctcccgcgtagctgggactacaggcgcccgccaccacgcccggctaatttttttttgtgttttttagtagagacggggtttcaccgtgttagccaggatggtctcgatctcctgacctcgtgatccgcccgcctcggcctcccaaagtgctgggattacaggcgtgagccaccgcgcccggccaagtgaaggtctttttaaaatctctcaccttcacctcaatttcaccctcttctcaagaggtaataatttttcatggattggcattatctctgcacatgcacaaatgcatataaatacaaaggagttcttgtttttcacaaacatggcaaaaccgtatacacattgctttgacactagcatttatatacttaagaatatagagatctatttaattctcttaaacttggacaaaattccatgatatggatgtaccataactacttaggtattttccaatgggtcaatgattgaatcatttccattctttctccaattaaaaaaatgctgcaaaaaaatttctggcacatacacatgtgaatatttctataatatggatacctccaagtggcattgttaggttgaacggtatgcacatttaaaattttcgtggatattgaagaattgctttctaaacagggtgcaccagtttacttttctgcagatagtgtgtgagaatggtcagtttcccaaacctgtaccaacaatatatacaaataaagctttttagtttttttttgcaatctgatgcaccaaaattttaaaatttttatatgaatttcctttggaatatagttaaagatacatttttatttatacaactttatatggcttcattttaaaaagtctttaccaaggattataaaaaaattctcctatgatttcagtgatgacttcttagttttaaaactttttgtgtgaagtaatgttgtgtaatgtattttttaaatgcatagactattatctcaatatgtttactgatcagtctatttttatatctgaatcatcacctttatcaaaaccacgtgtcactttcgggcttctctctacctggttcattgacatatttgtctacttctgtatactaccacattatttcaattattatagttttactgtattttgatttgatagtacacatgctgtctttttattctttcttaaaacttgcttggcaattatcacattttttaatgatgaattttagatttcacttgataagtttgatagatgatcttattgataatttgacttggatttatagattaattttaaaaaaatttatgtatttatgatatcaccatttcatccatgaacatggtatagttctattcaggtcttattttatgcccttttgtaaagttttctgttttacttttatagattttgcccatgtcttattatatttattctgggtgtttgaaatttcctctgacaacttacaattgtttttttttatacaggaaagtgatcattttcagtatattgattttatctttgacattttactacgatttattagtactaacagtttcatactttattctttggatcttttaggtacagtcattttcaactgtgaataatgacagttttgcctagtccttgtaaataattacaactcataacttctttttttttccaaaaatttcacattgtttgtattgactaagacttccaggacagagtgtcttgttgctagctttaacagaaataattccaatgttttgccattaaacataatgtgtgatttggccatttatctttttataaatcaggaaggaatgttgaattttatcaagtgatcttgggatgttgttgatataatatgattattctcttgtaagatattaatatagtgaattagtagactttctattgttgaatgaatcttgaattattgggggtaaactctagttgttctttaataaattatgtgaatataccatatggttcatttcactaatattttatttgatatttatattgctgtttataaatgagattgccttatagcttctaatagaaagtagtagtaatagtagtaacagtaattcttgtccttccttttccccttctccttcttctcctctttctcctccctcccttctttctttttgtcttatatgctatatctagtagcactatcctagtctcagagaatgaaatgagaaactttctatcttttctgtgttccgagatggtttatatacagagacgatctgtttctttgaacttctggtaaactatgaacataaaagtgatgaggcttttttttaaaatgtaaatgttcgttatccttaaatttcttctatagttattcttttattcaagtatgttacttctcattgtcatatctgataatttttttagacaattcatttattttagtgtagattttcaaatttaatggtataaagttgttctgtattttatcattattttaaaatgtgttttgtatctgaatttttattcccttcctcaatcccatgttgtttgtgttttctctttttattctcatccatattgccacatttattttcttggtcttttcaaagaaactgtttttagttgtattgaatgagccttttgggggaaagggtgtggagcggttctatttaattagtgtctgctcttatttttatgaatcccttcttactttcatcaggtgtatttttattacccccctccctagtttatggaattgaaggctttgttcatttgttttcaattcttttcactttctattcattacattaaaggttataaagtctcatttgactaccctcttaaccacatcctagaatttttattcgtttgttttgctattgctttgtttttacttttaatttgaacaggtatttaataagatttataggttttggaactttattcaggtatttttgaatgctgtaatacatgtaacatttttgagatgttgcatggatgtttgtaaagaattcatattttctgttgggtatggggttctgtcattcttatttttaaacatttatttttaaagtctaatttcctatctgaggaaggcatgataaccttttccatgatgaatttgttagttttgcattacattacccgcttttgcattatgtattttatagctttgttgctaggtgcatagaagttcatcactatgattgctccttgaagttctttgatagactgtattctttcttgacataaaaattccctgtactggctgggcacggtggttcacgcctgtaatctcagcattttgggaggccgaggtgggcaaatcatgaggtcaggagttcgagaccagcctggctaacatggtgaaaccccctgtctctactaaaaatacaaaaaattagctaggcgtggcggcgggtgcctataatcccagctactcaggaggctgaggcaggagaatcacttgaatctgggaggtggaggttgcagtgagccgagatcatgccactgcactccaaccccgggcaacagtgagagactctgtctcaaaaaaaaaaaaaaaaaaaaagtttccctgtacctatttaatgttttggcctcaaattatattttatatgatactactatttcactacttacttttgttttattgatgttgctttgtatatatcttttccattcttaaattttcaacctttatgtgaaactggttctcacataaagaatataaaactggggaatggtgggcatatatttaacctaatccaatatttgaaattctttcttttttatacatgattttaacccattaacatttattaagtttactaatatgtttagtttttatttttgctatcgtttttatgttgtctgttaatcatggcatatgaagttttctctcttttattgcatggatgaaattttgtttcattttttttcttttctgatttaaaagtgtacacctggggtttggtcacataatgagaatgcttaatttctgacacattttaaatgtgtgtgtgtgtgcacatatgcattcagcatccatatcctcccttgaacaagacaaagccttatctgtcatccatcccagccccatgtcctttgcctttccttcatgtgaaaatgatctgtgattttaattccagacattgtaaaaaccattatgtactacccattatttgaacttaaatataaatataaactgacctttggtttacttattttatttcctctgttgtataaaacctttaatgatttcagagtgagtctgagtccttttttatctgaaaatgtgttattttatcttgcacttgatgctacatatagaattctaggtttaaaataacttcccccagccctttgaaaatattacctgactattttgaaatatccagtgttgtcattgagaagtctgatgacagtccaattctcattcctatgtgggtaagctgttgtcttcttcctcttctttttcttcttcttttcctcctcctcctccttcttcttcctgcttctgcttcccctcctcctcctgctctcttcctccttctccttcttcctccttctccttcttctcctcctcctccttttccttcttctcctccccctccccctgccccctgtctccctctccctccccctcctcctcttctccctccccctccccctcctcctcttctccctccccctcctcctcttctccctcccccttctcctcctcctgctcctcctcctccttcttcttcttcttcttcttctccttctccttcttcttcttcttcctcttcttcttcttcgtcctcttcctcttccttttccttcttccttcttctccttcttcttctcctccttctcttttttttccttctagcattgttttttccactttctttctggaggttggaggtctcttcttgatgtgacagtgtgtgaattcttttttccagaaattttcccatcagctgggggattctttcaaacgtaattctttttatttttctcagtctacagactgaaaaatcatcatgatcatcatcatcgtcatcgtcatcatcatcatcatcatctttttatttgtgggggacagagtcttgctctgtagcccgggctggagtgcagtggcatgatctcggctcactgcaagctcagcctcctgggttcacaccattctcctgcctcagcctcccaagtagctgggactacaggtgcccaccaccgtgcccggctaattttttgtatttttagtagagacagggtttcaccgtgttagccaggttggtctcgatctcctgacctcgtgatctgcctaccttggcctcccaaagtgctgggattataggcatgagccatcatgcccggcccatcatcatcatttttcaatccttagctcgcttgttctttctggaacttctacttgatgggtattagacactttggattgtatctgcatgtcttttcatttatctcctatactttccatttcattatttttgtactactttcacatgatctttcatgtcaggaatttggctgggaccatgtctattcagcttttagatcttcaacagggatttaaagaaaatatatgcaatcaaattgtgaatttccaacacttttttgtcttttccttctctgatggctctatttccaatcagtcctttctctctttatggttgcaatattatcctttttgtgaagatactagttagaattttttattaaattatctttgtcctctgaatttttttttttttttttttttggtacatcttggttcttctttgttgtgtttttagcttccttcacatttgtagtgagctattttgtcatttgtttttgtgaaaagaggagtagtggcttagtattggtgcctggcagatattcttctgtggttctctaggtctgttaccccatcaggctctccatggcatgggagggatgctcattggctcttactgtggagggttctgggactgtcagactcacgttaggatgtgcagtgtggggtgtgtgggcaggaaaataggcaggctgggactcacccacctcctccctgccctccccatcctccctgggaagagggcaggctttctctctggcactgggagactcaggtgctcaccttcctagtgggtggccctttcatctttttccccaccacgttgatgaggcaactttaaactctctcctgtgtctttccaggtccctgtcctcactctagaacatttttttggttaggtgattcatattcttagagtgttggataatacttggcacttggctttgaggatgatgcttccctctaccactgcactttccattttgagtttttgtggatcagctcattattttcaagttctttccccacagtgtatttgaggctgttctttggcctatgtctattgatctgatcccatctatattatttctttctttctttcttgagatggagtcttgctctgtcatccagactggagtgcagtgacacaatcttggctcactgcagcttctacctcctgggttcaaacaattctcctgccccagcctcctgaatagctgggattacaggtgcatgccaccacgccaggctaatttttgtattttttttttttttttttttttttttttagtagaaacagggtttcactatgttggccaggctggtcttgaactcctgacttcaggtgatccgcctgccttggcctcccaaagtgctgggattataagcatgagccactgtgcccggccctgatttcatttactttccatcctcaggaatatctcaacattcctggcatgccgatgacctgcttcttgtttatttagtgccattagggaattattctatgtgaaaaaaacatcttttatgccatttccagggatttgaggtggcagagaaggagggtgaatgtgtccagttttccatcttgatacaatccactgcaaatgttatttaaatttcgactttctgggttttaagatttaatggaattctctaaatacaaacataccattagaaaaaaaaggataaagttttcttatttccaatatttatagttcttatttaattttctttgctaattgcattagttagaacttccataacaatatttaagaattggggtgatggggcatctttgcatctttagtttgcttttaatttgatgaaaacgtctctagtgttttatcacaaggacatgttttgggggtcggaatttttgtttgtttttagacagggtcttgctctattgcccaggttggattgtagtggcacaatcattgctcactgcagccttgaactcctggaattaagtgatcctcccacctcagcctcccaaataggtgacatgtcactatgcccagcaatttttttttctattagtagagacaagctcttgctatgttgcctaggctcgtcttgaactcctgggctcaagcaatcctccccgcttggccttccttagtgttgggagtacaagtgtgagccaccatgcctggcttgggttgttttgatataagtatattttcatgatcttatttttgtattgccaagcattttttttttttaatcagaaacgaatacccaattttgctggaggatttttgatgtctatcaaaatgatcatgtagatttgttccctggcctattatgcttgatttttaaatcttgcatcatcatttttgacattgatggagcattcctggtgtcctgttctaaaatgaaggagacatctgtgacctactcactgtatagtttcttctcttctctggagaaggcagcctttcacaggtgaagtgcgttcagtcattcccaccgtgggtgcagcatggatgacaggaaattaacttaatgctctttgttttgttaaatctaaatgatagatgcttagtaattgttggttgaatttaacagaaatatttagacttctagggttttttgtaaaatttcaaatatctgaggagaaaaaaataaacttgtgcatccttcctcataagatgttaaatagcatctttactcacttcaattacatttttggaacacctacatgtgtactgggcattctgcctagggatctgcaaagatgggacagaggtggctcctctgaaggtggggttggccggggttggaagggtgtctatgatgatgtgcccgtctcaagaggtacccatttccttcatgccaccatcactaaaccttcacctctgggagtcattttcttccaaattatgcaattaagatacttgaattgttataatggttattattattttaaactcttatttacataattctggtgcagactagatatatggccagttaccaaaaattttcttttaaaaattaagtattaaagattggtctctgctaaatgaggatggattttcttttattttaattttcccttcagaaataactttatattttctgattagagaaacgatgcgtgtccatgaactaatttggaaaatacacaatagcattcagaagagtgttggtcctgccacccagaaataacattttgttattttttctttctttattttctatgcctatatattcttttctttttcagaattggtaccaaactgtagccatagctgtatctttcacttgaaatgttatcatgggcatgttcccatccactgaaacgtcttttgaaagcctgagttttaaggcagaacgctccttcatggctttgatgtaaccattcccttactcttgaacatttggggtgtctgagtgtttttctcactataaatagcatttccgtacagttttgtctttattgctgatagcattctaggtttgttctaggagtggaaaactgagtcatagtttataaatgtttttgagccttttgatctataatgccaaactgctttcagaaaaaatataccagttttcactccttccagtacttcctaagaatgccctttctctgtaaccagaagcatatgtcatcattacaaacacacacacatatgcgtgtgtatattcacgtgtgtgtatgtgtgcatggctaattttacaaacgataaatgttgcttcgctattttaaatcagattctacccaagacagataaaataaaggaaacgtgagttttgtataagatgagagctgaatgtgcaaatgggccagcagtgtgaggagcaggaggattggatggggtctgagaagaggcagcacgctccgtctcctgatgtgctcacatctggggaggctttggcgtgaggcttctctcaccatggctctccccatccaggcaggactcccaacacgtcctctgctccacggcatcctttccaggcacggagaagccatcagcaacccgggaagctcagtgaagaggaaaggcagcaaagcaggaggggacagagttcccatccgggtgctgcttctggaggctggaggagaggccagattgtggtggccggtcctgggatgagtcatgacccagtgcttgcaggagtcacaggcaggctgggcgctgggcagaaagggtgcagggcatctgcagggacccagcctgcatgtgacactcccagggatgtcacggggaactgcttgtgcgtggctgagaacagaatctggcttaactcttttaacaagttaatgtttgtgctcatgggccctgtgcacatttaagaattaattaaatcctttaaggaagccatttatgtttgagaccaaagaagatacttaggggccaaaatacccccaaagaagaaggcctgatcacatctcttatgtcttggaagaccccacaagaccaacttccttataccccgatccgcagtgcggtgtgtacaaatacctttaacccattctttccggaaagctcctggggaggcatattaaacctgagttattttcaatttcatctaaggtgtctctatccaatgcagtttcttcaaagtctgcaatgtgggattcaaaatctcttagcatcatcaaagtcttagaaaaatatattactaggaagtagagctgcttcttgtgtgttaattacaacaagcccggctgccgcgcagataatctctagcgtcagaagcatcagctcaggcaatatcaggaaaaacaaaatctttttacaaaagaaaatcctaaattctctttttttttgccctctgaggaaaaaaaaagtgtggttcattgtgaagttaaatcccatctatttagttgttcttataaagatttcactgatatttgaaatattcctctcttgaaagggaaaaacaaggtaggttttcaggatccagcctcagaattatggtgctattttcggagtctttatcttcagaggaaaagctgtgaatcgtccatttgggccaggttctgagtacaactagaactttagcctgcctgagacgaatgcttggtttgcatgtgtgtgttttttggtgggtttcaccgttcaccttcacttacacgctgaggttgaagttgtgcggcagacggggctcttctttcccgtggctttgagggaagtagggatctgttaccagctgtccctctgggacatctgtgctccctgaaagtagagcaggctcctaaccaagacagggtccttgggcttcggaggcagtgaaggtcagggataggtatgtagaggatccagcgtgcagagaagggagaagtcggtagattttaaaattacttttttttctttaatgaggaggaaaactccatcggttcccatttattcagaacttcttaagaagatcctaatctactgtggccttaagatccaagttggttaaaggaagagctgagtgacagcctgtcctgaccagggagaagcaagccattggtggtgcccagggcgacttcattttttttaaattttcttttttagagacagggtctcactctgtcactcaggctggagtgcagtggcacaatcagagctcactgtagcctcccagttcctggcctcctgggtagctgggattacaggcatgccaccacgcctggtaatttttaaattttttgtagagatgagagtctcaccatgttacccaagctgttctcaaatgcctggactcaagtgatcctcccacctcagcctcccaaagtactgggatttcgggcgtgagccactgtctctggcccggcaagttcagaagatacggagacccccgtgtaaaacaacctaagtcacagggtgagagatctacccttgtcacgctccctgggatctccaggagagaagccccttccagcccccagtgtgtctttaacaccttctacctctgccagcctccctctgtacacgagagcaggccccaggccagggccggctgcaggcagcagtattcagccagaatttaataacattgttctctttttatttatttttataattacctttaatttagagcaagtgatacaaatttccatttagggtaatgatatagtttccttttaaatgcattaaagtaaaaaatagtgaattaattaaaaaaatattagcaggggtacaaaaacatgggaaaaaatgtgaaggtagtttattgcagtacaactctatagcaaaaagcatcaggaaggtgatatgcgggtgcctgaaactgggagcacagatctgtaaggcccttttagactatttttattttatttattttctgaaacacgtgaggtgacccttagctactggagagtttaggattttaggaaacagggctctacagaaaacctcctgaagacaagacatattgacctaagaggtttaggatggattccaggcccaaggaagttgcatcagaaagatcccaagatagagtagcccctctcctctttagcattaatttttctagaaaggactaaagatatctccctaagtaagctaagaaccctactgcccaagaaaaaggttactagatgtcaagtaatattataatggatgctgaattttaccttttcctttctctgaattctcctgccacctccctgcaagagtatagcccatgggggtggcctactgtgttcttcctgctctcagtttgggtatcaggtcttgaccctcttcctttctagaggagacttgtccaggcttatctccacagttctcataacacctagcacatagaaggcatcatttgcccattccatctatccatccatccacacatctacccatccttctatccttctatttagcccttctctttctctctcttcctttcttcttttctctctctctccacctacccaaccatatagccatcgatccatgtatccatccaccacccacccatccctcccttcatctgcctatctacacattcatccatccatccatccaaccatccatccatccatccatccatccatccatgcgtctacccacccacccatccctcccttcatctgcctatctacacatccatccatccaactctccatccgttcaaccatccatccatccaaccaaacatccatccatccatccatccatcctcccacccacccatccctcccttcatctgctcatctacacatccatccatccatcctcccacccacccatccctcccttcatctgctcatctacacatccatccatccatgcatccatccatccatccatccatccatccaaccatccatccatccatctaaccatcttctatttagcccttctctttctctcccttactttcttcctttctcccttcctccacccgcccattcacatatccatccatccattcatccatctaccacccatctattcatctatgtatttacttcttcatccactaaataaatattttattaagaatattcagtattaaacaatagcaccaaaaatctgttgggtgcctccagcactcaggtatccaatagggatacagtaataatagaaggagacattgtcactgctgtcacagagtttatggctaatgagagacagaaatggaacaagtggctattctatgcccttaatgaatgaagaagtgaatgagtggattggtaaatcccttttctctgtcactgctgggcactgggacctgtggagtccaagaatgctggggtgaacaagcagttccatagatcagaggttgcacttgccaggccttcgccagctgggcttctggagtgagataacaggctctgcacagtctgctcaatgtgtccccagccgctgagggcctgcccagactgtgcgaagagcatgcaagggcagggctccctcccgggggcttcggcaggagcaaggctggcagtgacagcagctgtggcggggaacgggggcctgggagcggtcgctgcgaaggacgtcagggaggtgggggcaggtgggagggtggataagtagtaatatgatggggatttcagggggtcagacacaggcagtcccaggctccctgccagggtcaagcatggtgtcttgaaaaaaagacagggggcaagtttcccagggtctgggcagtgccctctgcacctacagtcccgggtgctttgctgggggcctgggctggccctgcttgctgtgagtatgcaagggcggccactctgaagctcagctgatgctggccaggggacactttgtttctgggccacaggacctggatgtagctcattttctttctctctgtaactctccacctgctctgggtgccctgtttctggttccagatacccttacacttcctgcactttccaaggcacacacacagtgggctgcaggggggtctggacttggagcaggagcactaggtgggtgcctggtcactctgggcttctgggctttataatgctcactgtgcaataaagaggaggccaggaatccctctctccagggcagggctgaccgagggagcacagggaatgaacctcaaacctgtgcaacatcaaacaccctggggctcccctgtcatggacagcagactggcttctttactgagcacaggtaacacagtctgctgagcacacagggatctgagtgtgggtaacaggggaatctctgggttctggggaggctgagagacattcctgggacagggacgtttggctgtagatcagagaagttacccaaggaggggatgaggaggggaggatggatgcaaaaaaaaataatagggtgtgcaaggctctctgctgagagggaacttattaaatccacacggccttctttccggaagactctggaacatcatgcctaacatagctaaaatcacttctccttgacacagacaaggaaagcactggggaaagacccattagtgggatttcagacccctgggcaaatggctaggaggcagctgggcagggtgagaaatgcatgcttggtgaccatggtggagtgcccattctgtccagggcacacaggagaaggtgctgcctgccaccttctgcttcccacccaacgcttctggaagagcccaagccaacgtatggctcaggatcccaggggtgtgcgtggagccttctgggcttaggatggtcaagatttaaatgagtttggtagaagaaaacaaagatggtgaggacacaaaggcataagaatgacacaatggactttggggactcaagggaaagagtaggaaaggggtgagggataaaagagtacacattgggtacagtgtacactgttctggtgatgggtgcaccaaaatctcacagttcacctctaaataacttatttatgttaccaaacgccacgtgttccccaaaaacatgttggaaaaaaaaaaacaaagatgggagtgccttagtgtgatcatgggcagggagaaggctggaagggcagaggagtaaccgagggccccagggggtgtctggaagggagggcatatttgtttatcagccaggactcctttcgtttccagtgattgaaaatttaacccaaaccaacttaaaccaccaggagacctgtattgactcatatcagtgcaaatatgtaaatggttcagcctcaggtgctgtttgatccaggggctcaaatgtcaccaagcatctgacgtctctcctccttcacctcctcagcactggccttgtccccagtgctgcataaccccactgccacccgcttagactcttcttggtagcaaaacagctgccacagctccagatcttactgagagtgtctgaaccatccttgtagctccctggcaagccctagttatcactctcgttggcctggaataggtcatatgatgatccttgaaccaattactgaggctggggcatggaacattctgaatggctcaaactgattttatagtcagaagcagggagctggctacatctcacccaagctgcaggactgagtaggaagaggggttctcccatgtagggactgtggtgggcatggatgcaaggatgtgagtgtccatgcaggcatctgtagttggctgtggagtctggacctgattaataggtgtgagcgagagtgcaggaagtcccagaccctactaggaaccctgagcatggagtgacattttcagggttcccctcccagcagagcagtggtgggtcggggctggtagcacaccccaactgggcatgactgtgggagcctccccagaggtggtctactttggcaggatctctgcaacccctgaggagctacaaacaggtaatgcttggcttccccaggcctgcattatgaaaagcttgagttacaaaatgctctggctattaaaaacctgctactgactttaacggcaataaaatatctgctgtttatgagtaattagccacttctggaaaagaactctattcctttaaatttatgaggtgccttgatttatgcatttcatggtggggggatgtcatgttacatcacatcaacctgatgtaatttgatgcaaatcaaacacatgaaggagtgcatggaaacgctctctcctgcctcctgaagtgtgtttttatatgggggaaggttttggtccttattccatctttgttcttcttgcttgctttatcaggaaagtcttaggtgaatctttaccctgaaggtccttggtcctgagtgcactggctgcagcctctgaccacccttcaggtgcttccaagggggacttcacatccccgagggtggcagagatgcaaatatctgaagctatttaatgagcacccacgccttgccctgggttgcaggagcctggggaggccaacagggagacgtgcttcctgattttaaggaccccagggttggttcctatacacaggacatgatgtaatcaatgagtctgatttcatattgtctgagaggtgagcgtggggcccggcagggggaaggtatattttggaagtctttcatagcttctgaacctctgtctgacagcttagagggtagaggtgagggcattcaataatttgttggtgggactatgtatctatttgtctgtgtgcattatttcttctttagtccacccactcatctatctatctgctcattgatccatgcatccatccatccatgtatccatccatccatccatccaacatccatctgacacctactaaatttcttgagtgaggtaacaaagaaaagtaagacacagatgcatatccactaacttgctgtggaaccataggtgagttatcccctaccatctggcctctgtttacctatctgtaaaatgggcacatcagaccaagtgtcaaggagctagatgatctcagatatttctcttgctctgccatcctctgtaccattgtccctttcctcaaggaacatctctgtgcaaggacagaaggtgtggacaactctcattcatgggatgcagagatgcttgccaagtagttgaggagaatgtggggaagagtgataggaagagagataaggtaggatgcagcagtggccctttggtggaagcttttggcatgaatctgggtagtttgccctcaggaaaaacaatgatttttgatctttgatctctgcacttaaatggagttatcccaagggtgcaggggacagcaagtggaaaaagcctggcattgggcatggagcaccacccctagtcaatgtgaacttgttggttggctgtagatgtatctcagccggttggctttcttggcaggatggctggatgggttttactagatttctcggggtcatgtagaaagcacacaccttggtcttctagcatgaggcccttttctgttccttttggtctcaggcatactagctttccagaatgcccagcatcctagcctggcttcctcaaagtgacagtcagtggtgttcaagcatcatgtgtaatgtctctgggctcctgactttagaagggaagttacagttgaaacaaggccacttgacctccttcccggttccaccttgggtgtgacatgagacgatggaggaagtttagggttctcacaaagtccaggttcaatctgtaatataattatttaaaaatggaaccttgctattgttttgatttgagtcttcttgctttctggttaggagtgacatttttgtggtcacgagccaaattttgttgcttttgtgaattccctgctcacatgccttttgtccaggtttctaatgggggtgtttgacttttccttgttaactgcaagtgctcttaaaaatacaaaaggtaaagttattaactccttgcctaccacgtatgcctctgaatgctggtcttccatgaggctttggaacaggtgactgtgagcaggactgagggtgattgcaggcctgatagaggccgcatcaacatgcagatggtgacaggggaaggaggaggagaggcaggagcagacgcaggctttgcagagcacctgccctgtgcagacgctgcttcaagtacttcctagcagtgacctcactcatcttcccaggtacattagcattgccaccgtagcacactcatagagctgacaagttgccccttgggactcagttcttttggagtaagatactgtacaccttcttgaagcagcagcgagttttcctctgttacccagagtcccagtaaagagattcctcataggagcccagagagtagcagtggccaccctgtggggaccacagtggctgctgaaggctgcttgcagcttgggtaggtgatacttccacaccaagctactgaagttacagaacaccttggggttctctgaaggcctctccataggacataacttctggcacctggaggtgggggtgggggaagatgttgatatcaagaccctggtgagatagtacagagtgtccaacatcagatggatggtgcactgagggtcctggaccagcccatgaatggcattttctcccttgtgcagagagaaacattaattgcttcattttagaatatttctctgtgttcagcatcagcaaagttcaactgcagatgggtgatggttcaagatcagggtttggctatgcggtccctccctgtcaggtgggcctcagaggcacccacagggggatagagagaggggctgagttcagggtccagcctgacccgcttccttgtctaacacatgggaagccatgattcagagaggggccagggcacctgaggccacatggctacctggatgaccatgcaggtgtggtttaagggggtggaggaggctatagagggaggatccaggcccactgatgtagtggtggggaggccgtttgtcttggatcctggccctggggctagctgggagaggaggtcagtgcacctgggctggggagaggagtcattaattcagtcagcacttcctgagcacacctgctagtgtgaggctctgctcttggcacttgggaatgttgccctggtggatgtgtcatcatcacagagaggatgccttagctgcccctgagggcatcctatttggttccagttggctgtcttcttcctgacactatgcaaggatctagatcttggggtgcagtgaactgagatcagggagagaggcagcagtagaggttcagaatggaggctgttgtctccaagaacaactctagggaagggagtggcagtgtcaccccgcatcgtcagctcaccccaaaggcctcctctgcaccaggcactaaggagacaaatgaacaagattgttgttctcaaaaaaactcccagtcacctgatcctttttcgagtgaacagtgctcaaatatttgcatcgtctctttgggtggatgtttcagatccatctgtcctttagatgatgagtttcaggagggcagggtgtttgagattctctctgcagagccaggcaccgtgcctggtgtgcagtggagagtcagaagggcttactgaataaatgaatgaatgagtatttgcatgagcaagtacgagaatgctgaaagtagctagggagtcaacaggagagtggagtttgaaaaaggcacgttgaaggacttggaatccaaattagttcaaccagaatttgtaggtacttgtcacctgcaaagcattgggtttcagtcacatgtgggccccaggaggtcctggataagggtacagggtggtgaggcacgggctgtgaaatccaccatgagacagagtggggttagctctttatggagggtgtgaagggtgggggaggggattgggagtggctgtgtggaagaactgttctcttctaagttttctggggtgacattaaagtaaagttctagtgaccaaacttctcacctggctgtgcctccatgagtagagggcagggctggtcatgttgtctgagtcttcctcccggcatccccgctttctccccaaggatagatgttatgctggaggcctgcaacttgttcattcattcatccattcattcatttgttccctcatttgattatttatttatttgcttgttcctctattcagtcactcagcaaatgttcatcaagtgcctcccctgtgcctggctctgtgttgggtgctgggggggaccctggtgaagccgatggtcacagtgtggccctcatggggttttggacaggcatacaaacaaacccaacctaatgtagaagacactgttcggggtgaggccaagataccgtggagatagacggaagggctctggaccgggacctgacatatcagggagggcttcctggaagaagtggtatttaatttctcccaagattactaggcacaggggcaaggagggattgcagagaggagttcccaacaggggaaatgatatgcataaaaggataccaagttgcccctctctgctccctgagaaaagggagtcctttctctttcacccaggctagagtgcagtggtgcaatctcagctcactgcaatctccacctccccagttcaagcgattctcctgcctcagcctcctgagtagctgggactacaggcatgcgccaccatgcctggataattttttgtattttcagtagaaatggggtttcaccatgctggccaggctggtctcaaactcctaatctcaagtgatccacctgccttggcctcccaaagagctgggattattggcatgagccacctcgcctgcccattgggagtcctttttcaaaacactaataggttgaagcaagatgaactggagggttatccattctcaagtcacactttactcccccttctttcctgatcacggttcgaaattggtctttgtccctggaatccatctatggcaggaacactcccatatctgagacagcagcccccagcagccctggttccatgagatgggccacctgcagccagctcccccagaacctgcgttgagggggtcagagtcagtcttccctcctctcccaggaggccagcccggcagaggctgggccagtctggtgacctgtgcaggagctagggatgctaaattggggacctcaagaccaaaaaggaccaagggcccagcccagccctggccagcctccatctgttagcctcagcgcagaaattgcaggcagcaggggacccgatggagtgcctggattttctccttagtaatgatcgtgcttacttaccggatgatgtgtatctgagcttatgtcttcgacaggtgcccctgtggacgaatctccctgggccgacttctataaatatttcaaaatcaagccccctttgatcactcttgcgtatgtgcattttacattatatttagttttgcaccgaatcaaatctgaggcctctgtgaaatgaaaataaactgttcgacacgatatcatagtccacaagtgctcaaatgtaaacggctttaatcaggggtaaaggagcagggaggtgtagcctgatgtctattccctggctgctgctgccccagggaggggtcctgcggaggccagggcctctggttcccagggcaggggctgtgcgctgaggctggtgccaggagccaaggcgggttaataggggattaaatgtctaacttcctgccatgaccaagtctgctttaaaaagggagcaagaaagccagcgagaggagagtaatcaatacactcctgacaactgctggtatctttttcagttttgcattattatgttaaagatataccattcattaaaagcatatatatatatatacacacacacatacacacacacacacacaggcacgcacagagagagagagtcagagagagagagagttcttgttgctttccttggtggggtggacacaattcagataaaaatccattacagagaattagggggctatctccttctcaaatcatcccatctgggtgaaatgggagccctgcttcatggcctagatgctggggtgtcagggctgagttgccattcccaaactgcagtccgtggatgtgacaccgtgggcaacgtcccctctccggcatggtgactgatcataagcttagaggaccagggggcttggaggactttccatagggtgggattctctatgagctgcagacaggaggctggtaacccacctactctcaccaagcttccattctgaggaagcaggatcacttccagcccgggtcaaatccaggaaggtttcctggagcacgtgaagccaggatgtagcatggaggatggagttgggctcacagctgtggtgaggtggggctgggctgctgggagatgtggggaaagtttctgcttctactttttcaccattaaaaagaaggcaaggggagacgaatgcctttttccaaaccctacactcttctttctcatgcacgcggagccctcatcaccacaagagctttgaccttccgatgtttggtttgtggtccaggagtttattttcatcctttactggtttaccatcttctctgactcacattggatagaacactgccttttctagctgcgcatagacagaaggtgtgtacagttttgaagctgttctcttgtaagttttctggagacaagactgtcacccctatagttggtggctgccctagtggaagctctgtggggctgactggatagtcttaggacctcagccgttggcgtcttttttataggaacctggtagaaggatggatgaggctctccctggcagtgtgaggcgtgcatgttatgttcttcctctgttaagagcttcttgagccgctgttttgcccaaatatgaactccattctgctcagattgactttcaagtctgcaccagcccatgcctctgccctatctcctctctgtcccctgagcattacaagctccatatacattttgtacatgctgatcccttgggcacatgtggcctacttctcctctctacctggtgacctcctcaaggctcggccaaggcctgtctccaccactgccttccttcccttctctctcctgcactcccatcccactgtgaccagcatgctgaagctctctgcaattcagcaggtgacccaagcttcatgagtccatccatcttccccccacttccccaattcagcttttaaaggcaagggtctggtcttgcttatagatctctagatgtacccatgtcttgccacatgtaggcattacaaaatgttatcaaaagatgccagtcccactatatagatcctctgataagactgacaacaggagcatttgtttgtttgtttgtttgtttgattttgagacagagttccgctcttgttgcccaggctggagtgcaatggcgcgatctcggttcaccacaacctccgcctcctaggttcaagcgattctcctgcttcagcctcccgagtagctgggattacaggcatgtgccaccacacctggctaattttgtgtttttagtagagatggggtaactccatgttggtcaggctggtctcagactcctgacctcaggtgatctgcctgccttggcctcccaaagtgctgggattacaggcgtgagccaccatgcctggccaacaggagcatttttattaaccacctttacatgccttggtcatatccttcccctctcagcatgtcctctgctaccaaattaagggggcttctggatctaaaaactatgctaactgctgcggtcagcatctaagaagcattactgcacaggtagaaaatgcctcatattctctcccacaaccccctgtgccctctcaaaatcccttgaagtgaataggacagcctatcagtctgttagagcgataaagaaactgaggctctggcaggggaccaaggtcacaccgattctagtgggagagcaggcaattggattcatgtcaatggaacttcaggtgtcattctctttccattactccagtctagttgggggaataagccacctgactctacaggagaatgtggaataatgtatcagcccttctatatattaagaaaatagaagagtctaaagataatttttagggggtgaccctctgctctaccagccagtgagtaacagacctgctacatttctccgtctgcagtgcctgccatgtctgccccacttgatttcactgcctggcctgtgtctttgtgcgtcttctgttccttggcctcctcagagcttgcccatggctgtggcttccttctttccaggcatttcccaaatgactgagctgggttccgactgtcgttatccagcccaacaagaataaatgtgttgcaaaaagccagcctggccactggcatgtcttcatgacttaactttctgagcccctatttcctcatcttttgtattggaataacatagcaccaatcatctaagattgtataaggctaacatgagacaatgactgtgatgtacctagcagtgttggcaggtggtattttgatggagaggaggaagatgatgaagatgaggatcctgttaatgtacatagtgatggtggtggccatgatagtgatgatggtggtgatattgatgataatgatgatgatggtggtggtgatgacgacgatgatgatggtgatggtgatgatggtggtgatggtggtgatggtaatgataatgatgatgatggtgataatgatgatgatggtgatggtagtgatgatgctgctgatgatggtgatgatgctgatgctgatgctgatgatggtgatgatggtgataatgatgatggtgatgatactggtgatgatgatcgtggtgatgatggtgatggtggtgatgcggatgctggtgatggtgatgatgatggtgctggtggtgatgatgatgctgatgatggtgataatgctggtgatgatgatgatcatgatggtgtgatgatgatggtgatggtgatgatgatgctgatgatgatggtgattatgatggtgatggtggtgatgctgatgatgctgctgctgatgatgatgctgatgatggtgatgatgatggtgatgatggtgatagtgatgatgatggtgataatggtggtaatgatggtgatgatgacggtgatgataatggtgatggtggtgatgctgatgctggtgatggtggtgatgatgatggtgatggtggtgatgctgatgctggtgatggtggtgatgatgatgatgatggtgtgatgatgatgctgttgatggtgatgatgctggtgatgctggtgatgatgttggtgaagatgatggtgatggtagtgatactgctgctgctgctgatgatgacgatggtgatgacagtgatcattatggtgatgatgatggtgatagtgatgatgatggtgataatggtggtaatgatggtgatggtgatgatggtgatgatgatggtgatgatggtgatgctcttgctgctgctgctgagggttgttgctttttaatgagaggacagtccatagtcttaacaactaccccatgtgaacttgtcttctttccatccccagcagctacttgcctggctttgtgtggtataggcagaaggtgacccagggatccagaccagaagtcttctctactcagagaagatgacaggagaacccctttgttgccatttttcttttccatctgatgttgttgtgctcattatctgtcttcatttctgggctgcagttttagcagagactccaaaagccacagtgatggaagctctttgcctttgagaatttttttttcaccaaacccaaaccaaaaatggtcacgtctttgagaattttgaagtcatccaaagtttccagggagaagacattcaaattcttttcccaaattctccaactcttgtcctaccagcatggaagctgcctggggctccatgggaccacatattaagccagcccagccaaatcctgctcactactcaagtcagtgagggccttgactttggccaatgttccatccccaaggggacacttgggaatttgactacagtctgcaacttgactctgttggttacacagttgtcattctccacagcctgatttgaatgtggtatttttgttcataaattcagcaaggatttaactatttctggccccatctcatggcactgtctacacatcagtcaaaatggaacaggtcacccgcgctgccctcctgttcatctattaatcatctggcaaataaaccactcagtatcctgcccaccccagtaatgtttgtgatgtaatttgtttggatgcccaaatgtcaccagtgttgattgtaagagatcaaaaaaaaaaaatgcacttgctcagcatagcaagctctaggccaaaatgtaagcatgaaatctctggtttatttttgtaataatgtttacagctgtttaatgaccctgaaaaggttcagtagtctgatgttctgtatttcagaacaggagtgtattatgcttataacaaccttagttaaacagtttgagctacaacaattggaaaaatagtatttaatacgaagccattgtattctaggtgaaattgtcttaattactgtttactgtcagcataagaaagcaaggtgggcttcagggacagactgagggtcacgtgagcctccaggaatggggtctgcctgttactagaagtgcatgttatgagaagattttgagtaaaatccacaatggtgtttggaaacccccttgctgtgaacccgagtcctagaccctgcagagtaacttggaggtcagggactcctacaaggcttccgaggtagcagtttcacccacgtcgatgaaaaagggaatatatttagttgtgcttggctagacaacaatacttgattttttaaaatccagtgcaaatggttattttgaaagcattttattttccaatgattctttttcgtggtataaggaaaaagctctttcatacaacttactggcaagatctatatttttttggactattcataagattacttttttttttctgtgctagcaaaatgaaactgtgtttttgtgtaaaatttatttagactcgtagcagctggcatctctggtgtcctgatagttttaaatttcattttgagtgaaagatacaattaggttctctattggaagagttaagtgaaaacttttgtcattgatatcacaggaaatagtcttgaaggcagaaatgcaaaatcaaaataaccattagcaccatcaaaggcagctgaatggctcacggtacctgcaatgatggcagtgatgagacagaatgtattttgataatctgtgcacccaatggtgggtttcatttgctgagtgtgaaattgcattgttcaagaagaaaacctgtaatgtttggaagccttcacccggggcccctgcctgtgtttagaggtgcagcacaggggtttccacactgtcgtgaagaatcctgtggccaccgagagcctagcttagttcttcatcaatactgactgtggagttgagtccccaaggtgccccaccatgaccctgtgctcagaaaaggtcaggactgggggggaatgttgccatgtttctacattggggggatgatgctgcaaactcaagagtttacagtggcctttaactgtccagcctcggtaaggacatctggctgcctttgcagagttaggtaaattatgcattcatttgttccttccatcaatcagccagggtttattgatcctcttccttataggtttcaggctggggcaatgaactgaaggccaggggcaagctgttctcactgtttagtagtttgtttgcttgcttttaattgtgctaagggtttttctgcccaggtgagctggttcgatgagttcttgcagaggttattcaaagtcctgactgcccagttgccttaagcccaggatcatggcctgccctctgctggcccctggcttccttttttaaaattttagactcgggggtacatgtgtatgtttgttaagttacatgggtatattgcataatgctggggattgggcttatagtgcacccatcaaccaaatagcaaacattgtaccctataggtaattttatcaaccctccctcccctctctccctccccacttttggagtccccagggtctattatctccatctttatgtccgtgtatacccattattgagattagctcaacatggattaaagacttaaacataagatgtgaaattataaaaaaaaatcctagaaacacctagaaaaacctcttctggacatcagtccaggtgaataatttgtgactccagctcctgggtcacgcagtgctgagtgaagggtcagtggggcgtgtaggctaaagtgctctggcagcagggttgggggtgggctgtggcaggaggcccctccagggatattccctatggggcctgtaagggagcagcatggtctgaaagggaaggctcactccctggtgggctgggaaaagggataataagaccttccagcaggtcttttatttgaaattttaaaaaattatcttttaaattatttttgttttttgagacaaggtctcattcccatcgcccaggctgaagtgcagtggtacggatcatagctcactgcagcctcgacttcccaaggctcaagtgatcctcccacctcagcctcccatgtagttgggactacaggcacgcatcaccatgcctggctaattattttatatttttagtagagatggggctttgccatgttgcttagggtgatctcaaactcctggggctcagcctcccaaagtgctgggattacaggtgtgagccgctgcgtctggtcccttccaacaggtcttatcgtttgcaggcagctccacttcctccagccccatgagctcttatgtctgcagctggattcaatcctttaacagtaggataaatgatgccttagtttcccagtgtaggcatttgtatacatttctagagggctatcaggtagggactccccacccttccctcaacacagacataattattgcacacacacgcacacacacacacacccttagacaccaaagctgcgatggtttatcttttccccagctttgcattcagcctcgaagggacctttcattgctccctgttacttgtggacactcactcacgctggccccttagatgaacaggccctcgagggcaggtacatggaaggtccctggcaaatattgactgaatggctaaggtaaggaataaacgcattctggatgggtgaagtgtcaaggctggagaaattggggccgacccaggttttgtgagtcccaggccgggcctggggccagcttgtcctgcctcggctgttttggcgcagagacagcacaccaattaccccatactctttccaggaactcgtgcttccctttcttgctctaagtcgagcagcaggcatcagttatgactgccccattgcagcggcctcggctgcacctgctcgaggaatcacagaggattctaagctgactgtcgtggtcctttctcccagtaaggctctgtgcaggcttctcccaggcttattcaagggctggggaccagtatcctggaagcatctcctagggagctggtcagctcctctgaaaccctggggtctcccatgggcagtgacggtcagttaagttctaaagggaaccattgctgtgtctcctagtattcagcaactgggccatcaggggtggtccaagcctggggtgataaccatggacacctagactgtgagagttaggggtgtggacagcttttcctttccttttgtttctttctttcttttctttttctttctttctttttttttttttttttttttgacagagtctcgctctgttgcccaggctggagtgcaatggcatgatctcagctcactggaacctccacttcccgggttccagtgattctcctgcctcagcctcccgagtagctgggattacaggcacccatcgccacacccagctaatttttgtatttttagtagagacgaagtttcaacatgttgttcaggctgatcgcgaactcctgacttcaagtgatccgcccacctcagtctcccaaagtgctgggattacaggcataagccaccatggccggccagaggtggctttctcttggtggtttctgaaccttcagcttctcagtggtagccagggacccttccaactctgtccgattcggatcgtaggtgctcatggacttgtgcgaaggctgaggttaggtcacatgactgattttaagggctctggacttgtgcaaaggccgaggttaggccacatcaagttgaggttagagtgagtctctattcactcattcatccattcacttaggacacactgaacctaagataagccagctctgccttaggacccaaggcttcatccttgaccaagacagacatatcctctgccttcacgggaatgaagtatgtctgtaaaaggaccaatgacaaaatgttgcccccatggcaaatgctatgtagaagaaagtaacatgttgggacagagaggggctggggtgtcagcctcagacagggtgggcacagagggcttttgtgagaaaggatgtgtgagctcagacccacaagaataagaacagagccaactatgaaagagccggggcagcatgcatgttctagaacattctatcctcagctgaggatctagcaaaggcatttaaagaccttaaagagattacaaatctttgttaactctggccaggatagatagatagatagatagatagatagatagatagatagatagatagatagatagatttgaaaaaaataaaagaattccatactcaaaccaaatctgaaaactctcacattccttatttgacgagttgagctgtcacttgcatagcatgaatggtggtggtgttgggggacatggtcttcaactccatgcccctcatccaagctgatttgcagtctcgccgcattgcacattcagccttctttccctcctgctgaattggcgtcagctcatcagcagcaacctgaaaatagcccgtcttcctggattcatgtcttctgagctggccaactgggcagcctttggaagtgggccagccctgttggccttggactttccaaacttccatggagctgttgggtggaattctgagcaatcctgtgtggcttcagggtcatgatccctgttggctcagaagaggagccagtgcagctgtatggggcttgaaggtggagagagggtgccagacagggccctggggccaccagtctctgcctggagcctccagcaacctctgtacactgtgcctgctcctccctgctggatagtgggtgtcatgagtcctggggctggtgggtcttgtccaccatcatgtctccagtggcaaggctagggactggcacatggaaggatctcggtaagtctgttgaatgaatgcagcaacctccatgggatattagcttttttctgaccaacctccaaaatgggcccgcgtattttaaaaaaatttgagtgtagactgcccccagaagcaaaaaggaaagatgacaagctggaagccttctcctatggcaagtgcccatgcacctttacgctttgcacagttgtgcatatctttcattcgtggacaaagttggcccagcaccaccactgtaatccctctgcctcctggaagtaaacattcatggctctttcttcccttcccttgcaagatagactcctcctgccaaggaagtcaggtctcccattggagaccctccatgccacgcagtctcctggcgggaggcccagcaagcagcagaccctgccgaggctgcctgtgcttcctccacagttgagctctgtccccataggtctccctggttaatcacttagcccagaaatcagtcccggctggggttaagcgcagctcctggaccacctggctgcccaacacatctaaacaatgggatgcaagaggagaggtgtgtgcaaagatgattccaatggcaggaaacaaatttggactccttcaggtgggagacatagctggaaatagaaggatcccaggcaggggttcattgccttgcaaagctgagctccccacgtgctccaatgtggaaggggctgtttcctctgccctccctggagccatctggctttagccattctgcacaggctgaagagggggcagagaggactattaaagacaattatgcagaccagctttgaacgatagtgtttaacaaacaactttgagttctaattttctgcaaaacacatactgcaggtacaatttgtactcattattgtatattgggaaagttattaaaaacactcaaacttggttgagacttcctatggcatcattcctggattttaatgggtttttatctagttctataaaagacctctttaaacccaatcaaagtccctgctttggatatcttgccattgaaggatgggaagagccccattataaggtatcggtgtttcctttgacccaaatttgaacaacttcaacaatctgctaagattccgtcaggagataatttatacttcttttgatgggcacagttaccaaatgataaaataacagtgtttcgtaacataagggttaaatcttaatctctgaggtttgcaaagccgctactcgcagtctccttaaaatttaatatacctcgttaatgcttccttgcaaacactgaaggatttttatgattataatcatgtgttacagcacctagtactgtttctaagcagcatactaatcagcttaatgagatattactgcactttttgttgactaaagcaaaatcccttttattattctaaagcctgtcctttactttattttttcccaaaacattatcttgttttattatgtaccagtaaatatcatgccattgagtgttttttgtttgttttttttttttttttggccaaatcataaaatgatctctttcatctcagactggtgaatgtactgaatatagtaaacggaaacagaagttccaagtgggtttatttggtcttacagggaaagtcattctgctctcaggcaaactttggacggaaccaacaggtacaggtgcgacaatggggcaacggagaaaaagtttcacacgtagacccttgatttgttattaggtgttgaaagtggtaaaacattaataatttaaaggtgaatgaataattgcagtctgtaaatagaaaatacaaggaagacgatctgtcgccaaaacaaattggaggagcaatgccatattgcataattggcatttaataattcatttttttattattgtttttgacaagaattccttagcatgattatgtgtaggtaaggcatgaaatggaaattccctgcccgccaatgctgttgattcatggcgccacagccgcacctggcacggatctgaactctgcctctcttttcagggatggaagaagcgagcctgtgccttggagtgtcttcggcggagccggaagctgagccccacctgagtggccccgtcctcaacggccagtatgccatgagtcagaagctgcaccagatcacctcccagctcagccatgccttccccgagctccatccccggcccaaccccgaggagaagccccccgcatccctggaggagaaggcccacgtgcccatgagcggccagcccatgggcagtcagatggcgctcctggccaaccagctgggccgggaggtggacaccagcctcaacgggagggtggacttgcagcagttcctcaacgggcagaacctgggcatcatgtcccagatgagcgacatcgaggacgacgcccgcaagaaccgcaagtacccgtgcccactctgcggcaagcgcttccgcttcaacagcatcctctccctgcacatgcgcacgcacacgggcgagaagcccttcaagtgcccgtactgcgaccacagggcggcgcagaaggggaacctcaagattcacctgcggacccacaagctgggcaacctgggcaaggggcgtgggcgtgtgcgcgaggagaaccgcctgctgcacgagctggaggagcgcgccatcctgcgggacaagcagctgaaaggcagcctgctgcagccccggccggacctgaagcccccgccgcacgcccagcaggccccgctggccgcctgcaccctggccctgcaggctaaccacagcgttcccgacgtggcccacccggtgccctcgcccaagcctgccagcgtgcaggaggacgcggtggccccggcggcgggcttccgctgtaccttctgcaagggcaagttcaagaagcgcgaggagctggaccgccacatccgcatcttgcacaagccctacaagtgcacgttgtgcgacttcgcggcttcgcaggaggaggagctcatcagccacgtggagaaggcacacatcacggccgagtcggcccagggccagggccccaacggcggtggcgagcagtcggccaacgagttccgctgcgaggtgtgcggtcaggtgttcagccaggcgtggttcctcaagggtcacatgcgcaagcacaaagactcctttgagcactgctgccagatctgcggccggcgcttcaaggagccctggttcctcaagaaccacatgaaggtccacctcaacaagctgtcggtgaagaacaagtcccccagcgaccccgaggtgcctgtgcccatgggcggcatgtcccaggaggcccacgccaacctgtactccaggtacctctcctgcctgcagagtggcttcatgaccccggacaaagccggcctgagcgagcccagccagctctatggcaagggcgagctgcccatgaaggagaaggaagcgctggggaagctgctgtctcccatctccagcatggcccacggcgtcccggagggggacaagcactccctcctgggatgcctcaatctcgtgccgccgctgaaatccagctgcatcgagcggctgcaggcggctgccaaggctgcggagatggaccccgtgaacagctaccaggcttggcagctcatggccaggggcatggccatggaacatggcttcttgtctaaagagcatccgctgcagcgcaaccacgaagacactttggcaaacgccggggttctgtttgataaggagaagcgggagtacgtgttagtgggagcagatggctccaagcagaaaatgcctgctgatttggttcacagcactaaagtgggcagccagagagacctgccaagtaagctcgaccctttagaaagcagtcgggattttttgtcacacgggctgaaccagactctcgagtataacctgcagggtcctgggaacatgaaggagaagcccaccgagtgccccgactgcggccgggtgttccgcacttaccaccaggtggtcgtgcactcccgtgtccacaagcgggaccgcaagggcgaggaggatgggctgcacgtgggcctggatgagcggcgtggctcgggcagtgaccaggagtcccagtcggtgagccgctccaccacgccgggctcctctaacgtcaccgaggagagcggggtcggaggcggcctctcccagaccgggagtgcccaggaggacagcccgcacccctcctcgccatcctcctcaggtaggttagctgagaagcggggagaagcagcttgtacagcagccctgctcagggctgcctggttctgctcccaggcctccagtcagttccaaggccagtgggtcttgattgaggacaggggtgggttggacactgggccatgcctttctttccccccctgactggagggaaagggccgtcctttcacctcttaggccttcccttgaacactggctaccaagaaagtaagttgaggccgggtgtggtggctcacgcctgtaatcccagcactttgggcgcccgaggccggtggatcacttgaggccagggattcgaggccagcctggccaacatggagaaaccccatctctactaaaaatccaaaaatttaggcaaatgtggtgatgcatgcctgtaatcctagctattcgggaggctaaggcaggagaatcgcttgagcccgggagggggaggctgcagtgagccaagatcacaccactgcactccagcctgagcgacagagtgagacactgtctcaaaaaaaaaaaaaaaaaaaaaaaaaagaaagaaagaaagaaagaaaaaagaaagttgtgcgggagatggccaggtggtacatttttcagtgggcataatctacctttttcttgcaattgtccaaccccatttcaccgcctgacgctgtcggccatcatctggtctctggaactcaggagctggcattctgctctatccctgggtatgaatgtgtaagttccaaacttcaccatctttctctcccccttagcgtattcccataattctctcatgcaggcaccgcagtctccctccccaagccaaacctatcttctggccccttccaaaattacaacgtggctcacctgccagatccgtgtgacctaaagagccccaccactttcctctgatggtttggaaaagtacaggcatttgaaacacagacgcatgactgttctgtcttaaattgtactgtgttacacggctgatacagctttggggtctaaaatagcaaagcagaaaatctgtcatcaaaatgtctgtgaaattatgaagcttcctggcccagtttaaaaaaaaaaccaaaacaacaacaacaacaacaacaacaacaaaacacgctagcctcagacggctaaattaaaatcaccacctaacagcaggtaaggcgttgccttcatccatatttccaaagccccttactaatggatagtaaattgaaagttatctctagccctttataaagaaagcacctcgctaatactgtaatcattctgcagcctaacaacagaggaaatcatgccataacaaataccctgttactaatggcaacattgatttctgcaatcagccattaagtctagaaaatgaaagacagtttgaggcacctcgaggcactgccttgcccactgttaaagacgtagcagcaccctgttgagggtcattttttaaaagttttttcttctttcttgatcccccccaccctcactctttggtttagatacctatttcgatcttggaggcaattcactgctgcacttattaagtagatgccagttttagctttgctgttatagtcttgcttaagcatactcttcttctaggacaaaattagtattaaaataaagtgggactctgccggcttattacaaaccagtaaagaattgttaagacacataaatctggtctgcacattccagagattccgatagcacttaatgccgctgcttaaatacccatgaaacacactgtctactcctggagtcctagacttgtttgggatttattacggatgagacacttaggaagtgtctaaccagcagcatgagtgccaaggaggcgtgaggtcacactacctggagcgactgtcacatggaacatactaagattcgagggaagggttttcaccatgtaaagatagatccctacttgagaggcagccaagtgccaggtgtcccaatgtcaggaggagctctttctggcctcctaggatgaggtctgctcttctggcatgtgtcgtttctgattctggattaggacctttacaggacagggtgcagacagcaaactggttcccctaagtttttagagtgacatggagttaacattgacagatttccatccctctctcagacctcctgaaatgtaagggtctcggcagaatattctgacaccaaatgttcagcttcattaatgacgtgtttaccgtgtttttctcaccttctggccaagtgatagcctcatgctattcctatctctgttgcttgcctatctctcagtgcttggttgaaaaaacccattttgcttaaaaagaaccaaccgtgctcatgactcaaaagagaattatacttgagttgtggttatcttctcacttttatttcccctcattgaagtattttacaattgtgaatactgattctttcatttctggttgacttctttgttttcttcatattcaaattagaccctttcataattttctgactaagtaggagaattgagggcataccaatatacaacccgaatcagctgtgcgtctggggcattcaggtttccctgggatttaggactcttaaccaaatctggttagtcctccctcttatttccaacaagtttgacttgtatagaagtgcgattaaaataagcatttaaataaaaatctggatacaatgggtattttattattacctgttaaagagaaacctgcaaggtgaaggagagagagagaaaaaatctttaagcccttaagtaaagaaagaagtacttattaaggcttctattaagaaataactgcaaaacacggttttacaaatttctcagactgcataacaatgtcgcaaaacttaatttgcatcacttgattcttttttttgttgaaaactgggtcagtagggcctgagaaactattttttcagatcttaaccaatgaattcttctttataaatcgctgctcttaacatgatagtagttctgaattcatcataaaaaacctttttacagagcctcttagaacagatctctagaagaaggcttacaatgagtggcagagacgtcctttgttatctgatgtaattctttgcaaagaaggattgggaacggagtggctgtttaaaaatgtcttgctcagaccgagatgaagaaggggtcaagtttgcaatcaaacagttattgccgagatgggcgactgtcactggctaggctaatgtgggatgcagctgtttgttatgtgagcaaaagaatgtttgaatcagtgaacatgtgaaaatgattccagtgaaccagaaaatgtgtttgttctttggctctccaaactgctgagaaccaagcttaagatcaactgcgaaaactaggacctctgacaaattgagaggtcatattttctaacagaaaatggacaaaactagtcacacagatcacttccccatcttccccctttgttttatttttgttttgttgttgtttatttgacttaccagtaatttcacaccgtggtcaatgtcattcaatgtagcctccgtgtacaatgcaaagagaaactgtttggaaagcagcagcttattaattttacttttatggcatttagaaagcggggtggctgtttcgatgcctcctcatttctggcttgcatgcaaacactcttatggcattaatctttgcatctttctctaaaacctcctctagggctgagctcgaatcctcgctttgctctgagtcagaacacaaccaaagttctgtttcttcagattttgctttggaaatcacactcagaataattaaaacttaatgtactaagaaatgatactgttcattatatccaacagggcagttaccttctgaattccacataattttggagtggggataattgaagtgttgatggtgggaagggggtaattgaatgcattgaccctctgttcattaaataaagtcggctaagttacaggatcaatggaaagccagggagagatgcgaagatgaaaatatcgttaacccctactacttctggtataatattttgagatggacaaggattatttggtcagctgggctaaaagccttgcgaggtcttcttttgttgttagagctgcattcctgaaatgctgggtctccatcccattgaccacagcatcaaaggcctttatctggggcgctttcgcatttacatggggtgtatagtgatatgatagattttctttcttttccacctctttttctcatgtggctccccctccctgcccccgttcacgataaccggtgcctgctccacacacaaacaaatccaggcacccaaaagaagaaaaagaaaaagaaaaagaaaaaaaatttgagtttgaggattaagatcttcatttttttttttttttttgcttgtgcattccaattgttcttaaaatatttggcaatgtcaattagtaactgagcagagttagctgatgaacacaattttccagtagactgagcaccctattgttgccgagcgaacagcagatttctgaggtcattatcattcgctggttgcttggcccagctgcttcctgctgcaaaagccaaactttataccggagctcggggaggctgcagcaacagggggctggagggggggagaggggagctggctgcagagccgaagacagtcattatcagcagaggaaacagaaagtaaaagtttccaggcaattccaggaaaactgccggagcaggcttcttcctcctgttccagtccaaccaccttccacctctaggcagggaattaaaaaggacttggggagacccccctgggcatggtggcagctaatctctttgtggaggagaactttggaaaacaataatcccatttataaataatgcttaaaaatttttttagcccaggctcaagcatgtgagtgatgccctcttagatagcctccttcattgttatatatttaaaaaatcattttaaaaatgatattaggaacttgaaattagtcaatttggggatgacaaataggcaacattatttaattttccagagggaccttatgaacagatcatagtctgagattccttttaaaatcacatttagccttaaaggttccccctacgcctccccctgtcccctgcttccttatttttctgcccccagcccaccccaactccagccttccttccccacctcctaatttgggaactggttcagtgagatgaaaagctgcactttttttaaagctcagctgtgaaagccgagcgccatatgcagcccttcggtctctgccgtggaagcgtgtgcaggcggccgccgtgtttgcggagatttacggaggatcggctcgtgtgtgccgaagctgtgcccaggcggacgccggccaaggcccgtcccctgagctgagagccgagagctgaggtggccgcccgcctaggcgaataagccggctggtcaggtggctcctggggaatgtcagatggggcacagggtcagaggcccccgtgtcttcccctggcggccacctttccgctggggcccaagggtggtctgtccacttgggacgccctgctcgtgccgggatcgccgttgctctcagatgctggttcatgtgcggctgtcacatcatcctcctccttccccggagccggatgcctaccagcagtttctttttataaacttcccattcacttggtagacttgtatcatctcgtgcttaggagcgatgatttgggaacaatcagtaacacttcggggcttttaccatctttctgacccctttacatggagccataaatcccgcttctccggggctgcttgatgccagtccaccgtcacttggcatttcagaaagagggtacttgcacaggctctgaaagtcttcagactaggagtgtaacatcagagatgtgtggcataaaattgcagaggcagagcaccctctctgctccagcacttaacaggcaggacatggttttgcttgtgagggattagattcgaggccgcggagtcactcaaatgtgtttctctggcggcctcacttggcccatctgtgggatggacaccgctgttgcctgggctgcccttctgtttccaacactcctgcccacggagcttctgaggagctccatgaagctctcctccctatgcatgttagcgcaagggacggaacagttcatttaaacctaaatttaatggaaataaggaaaacatagattagctaaggacaggttacaatgaggcaaggaattaagcggtcaattttcaaaacagagcttgaagcattagctgcgtgatttccattgactcgaatgggaggttccaggctcaggtcttgaccaccaccttgggtgtgttggggtgggagttagtaatttgctttgcagacagccacaaggtgtcccttgattgatggtttggccagaagcaggtatcacgagcttccaggatctgactcttacccactcccatgcttaccatgcactcaggtagctgggaaatgatgcccactgtgttatgtgagccctgccaggggccacttctgcagagctggggcagcctctgcatagagggcagattggggtccttctggccgcccagatcccttcactgccaggttgcttatctttctaattctttctctggtttgaagctttgtgtcctgttcataggaagtgcgttcccaggaagggtaaggtaagactttcttcctctacatctcagtgcatttcccacgtctgccccttctccctgagaagtttctggcaggtagccctgatgtctcaaaggggtggggacagggctggcttcaacaaggcctgttatactggcctcgatattccactggttctagagagagaccgtgggtatacttggagacctagagatggagacagtgaatttcatgggaaagaactgtgcagggagcatttggaagccttttgagcctgggaagtcaggggagtgagtagttaactcctttacccgtagagctgttttggagcattgatggcaggggtggagaaacacctgcagagatcaggagattggatttgtgcacacttcccaaatccgtgatgattggactggaacctttgccatctgtgacccttgggcctgtttgctgcccttctgggtgtctcacctcccttcgtcttcctctcctctgtcggcatctgatgggtgcatctctccacccttgttgatggtgctggcatgtggaggaaggaggcgggggctgagcgaggcttgcaaatgcagaggaaaggggctctccaagaggggtgcatggtgtcgggggggtgggcaggtggtggggggactctgatctccccaggaagtgagctttgctgcagctgagagcggccatgggtcccccttgtcttttgctggcaggatggggcgatggcaacatttacttaagctgtggagtctggcactgccgcagccaggcgccatctggaaagcccttttcagaaagctgtgtcccccccacccccaaaaggaacttaggggaacaggacttgggcagagctgtgggacttgtttcttgggcagaacctgctcactgaggcacctgagccgggctgggtttccctgggagccaggtagataagacaggtctacctcggggtgcatgtgggctctttgctgtctgtggggccctcggttcatcctcgagccaggtctggtttaggtttactagggctgtattttccatctatttgttttgtgttgcattttgcttactctcttcacctaagtccttgtatattgtgagtatgatggggtggcgccagccgggattggtcagtgactgttccttccctgtaatagcagggctgattagcagaatataagaaatgaatgctgtgcctctgaaatgtgcctgtgagacaggatctagaactcagcggctcagcttgcaacaaacagggcaaactaagcacagagatttgctaccatcctttccctgagccacatcttcaaaaaagactgcagagtcccaaaacaatgcgtgtctgaacaaacaccatcttcagctacctgatgggtgggcctgggcaaaacgggggccatgccgaaagcaagggcagcagtccaggcagaattcatttgcctcctgtttccaccacccccaagagaaagttgtccagggcttagcttcttgtgggacccatctctttgttgctgtgagccttggggtttttgtgtgacatgtggcatgtgtctgggagaagcgagaggcacagcacaagctgactccttggcttggctgcccaccacaccacatgggaggccggccctccccttaacggtgcccagccaggaggctgcctccaatgtgggcatgaggacgggcttggctttaacacctcctcacttgcttccaaaggacagggtcattttccagcttttcttgcaagcagtgtctacctttaggaacctttcagttttactctgtgccatggggcccagggcatttcacggagaaatcagtcctttcctttacagaggcaacttgtaggactagacttttggccaacgctagtttcttttcttttgtctgacctcagttccaaaaccatttgatgcacgatgaaacaggatcgcgccacagtgctctcttctcttcattaaagtaatgtccagaaactcttagcacagtggtggtcatcgtggcttttggacactctcagttgtcctcaatcatcttgagaggcattctggaacatgttcaacatgttaacgttgagttcaacatgaagtgtatgcagtggtggttttcttgaagatcaagacagatacatgcttctctttattgctaaatatgtatatttttaaatttgttgctaaaatatgtgtttttattttcgtttcatttcattttttaaaaactcagtagtttgccctgaaaaattggagtgatcctgcagcaaagctgctatgtggcatcataatccctgttgagagagaaggcttggcagtgttcatgtccgtctctggctggggccagacccctcggaaatgtcctttttagtgaccttcaaaacctttccacttgggaccgggtgtggtggctcactcctgtaatcccagcactttgggaggccgaggcaggtggatcacatgaggtcaggagttcgagaccagcctggccaacatggcaaaaccttgtctctactaaaaatgcaaaaattaaccgggcttggttgtgggcgcctgtaatcccagctactcgggaggctgaggcaggagaatcgcttgaatccgggaggaggaggttgcggtgagccgagatcaagccattgcactccagcctgggcaacaagagcaaaactccatctcaaaaacaaacaaacaaacaaacaaacaaacaaacaaagtttctacttggtctcgtccacgagtcccgttcactgactttatgatgctgttgttgttcaatgacttcactattctttttttcttactataaagtaattcttgttcatcttggacatttaagagatacagataaataaaaaataaaaaaaattaaatgtgtatgcctaccaccactcaggaataatcactgtgaacactttttttttcactaaactagtaaatattttgttatcgatgcatagtttatgtatagattttagggtacctgtgctaatttgatacattcatataatgtgtaaagatcgaatcagggtaattgggaccttcatcaccttaaatatttatcttggctggatccagtggctcatgcctgtattccaacactttgggaggccgaggtgggcagatcacttgaacccagcagtttgagaccagcctgggcaatatagcgaaaccctgtctctacaaaaaatacaaaaattagccagagcggtggcatatgcctgtagtcccagctacttgggagggtgaggtgagaagatcgcttacgcccaagaggcagaggttgcagtgagatgagattgtgtcactgcactccagcctgggcaacagagcaagaccctgtctcaaaaagtattatcttttctctattctagaaacatttgaattattctcttttggctattttgaaatgtacaatagattattgttaactctcgtcaccctactgatctatcaaactcgaggtgaacatttttaattcatacttttccagtcctttttatgcaactaaaaatgtagttagccaaaaagtacatacttctgtgtaagttcttactgaaatgtatgtcatattttttcttgtcattgaacatttcccaccaggatcagcaaagttttcctgtaaagaaccagctaatgagtattttcggctttgggggccatgtggtttctgtagtaaacactcaattctttcataaataagagtgtgatggtatttcaataaaactttattgaaattgcaaaaattggcaatggttcagatttggaccctgggctgttgcttgcagattcctgtcctaatagtaatagttatacttttttttccccaagctttacacaagtaatatgcacatggaggaaatgctagaaagatggagaatccaagaaaaactctatatctataaaatggtttagccaatctctgattcgtgaacacgggacttgtttcttttcttttttttttttttttttttgcctgagatgcaacctctgaggtgtacgtttctgcagcatttgtgacctcatcgatcattctgatcttctgcaccattatttccttaggtgtgttgcctcgcagtagactctctggtcacaggctggtgagtccgaggtggcagagctaaaccacccactgtgtgctgcggctctagactgtttgttttacgctggtgtttgcaccatgagaaaatcccctcgtaagattgtactgaagcctgtctccctgaagctaggtagttccctatcaccacgccactctgtgacttatttgttcattcataaatacactcatttgtttgttcaatcattaattcacttatttattcactgaatgatgaaatgcttattaagtggcttctgaacactgagcaaggcatcaggtgctggagatgcaaagatgagtagaggccgggcacggtggctcatgcctgtaatcccagcactttgggaagccaaggtgggcagatcacttgaggtcaggagttcgagaccagcctggccaacgtggcaaaaccccatctctactaaaaatacaaaaattagctgggcgtggtggtgggcgcctgtaatcccagctactagggagactgaggcaggagaattgcttgaatccaggaggcagaggttgtggtaagctgtgatcacaccactgcgctccagcctaggcaacagagcaagacttcatctcaaaaaaaaaaaaaaacaaaaaaaaagatgaatagagatgcatctcagtgtctggaagcccacagcctctaggtgctggacaggtaattcacagagtgagacagacacatgggagggtttaccctggggcctgtgggagcaccttggtgcccagtttgttctcaaaggatctgaaagggcaaggaaccacttcaattagctcagcgacttctttggcaaggaggagtaactctttccctctgtagaattaggccaatcctggtgacttcctggaggaagcagacaagtctcttttagccactgtggctggctgctgttctttccctggctgggagccacagtctaagtaaatgccttgtcacatacagaagaggccctgggagaagagtccagtgggtgcttcccaggaaggcatcccaggctgggaagggagggagagggccggagcaggatgggagctgctgaggcccagtgaaagctttgttgcaccctacacaccacatagggggcctccccgagggagagcactctgggggacgcaggacagttctccacaccagaaagtgagaggcaggctcctggctccagctcatggccccctgaccatgctgtccttggaggcagtggctcatgaatggaggaagacacatcaggtggtcaggggtgtgaggctcctactgggaccctgcagctggagcgtgcagagaacctgtgaggccccacactgggaaggagggctcacattttatccatttccctgtctgccttaggaactgtccatacctgccccacaggggctctgggtgtctcatgggagggctgcacccccagtatgtcagaacgtccatctgcagcctgcagcagaggattgcaggcactcgtggatacggcccctcttctttttgggtggtgggtgggacatgaactgaacgagggcttgctatgagaatgggtggaagtgacttctagtcaattgccctttatcttctgatgaagcaaaacgtcatatacttagatattaagccagagacaaacacattttctcacgttaaaggaaaggctgagggcggaacgtccccacttcactttggagccgggccccacacacattttcggggccatgcgtttagtcatcctgctggactatttgggcagctcgctttccttctctgggctttggctttttcctccacatcatgggaatttgggtggggaagtgtagaagattcggagacgcctctcagcttccatttttccttcatctttcaatgtttcccccacctttctctcctctcccttcctaaatgtttccatggcttgggggtgattttaaagggtcttacctgctgttccttgagtagagaattaacgttcctagggtccaagtatttcctcaatttcctgctgtttttttttttttttttttttttgaccgagtttcactcttgttgcccgggctggagtgcagtggcgtgatctccggttcactgcaacctccacctcccaggttcaagagattttcctgcctcagcctcccgagtagctgggattacaggcatatgccaccacaccaggctaattttgtatttttagtaaagatagggtttctccatgttggtcacgatggtctcgaacttccaacctcaggtgatccggccacctcagcctcccaaagtgctgggattacaggcgtgagccaccacgcctggctgatttcctgctgatttttgcatctgagcttcatcgtgtcgtctctgagggacccatgtgcctggtgaggggctggggagactctcttctatctcatttcccgtgggccccccttccacctcccatctctcctggatgccatagaggcagagccttgcagctggaggggcactgccagggcccctgctttacccagcacgtctgtgagtgtgttaactgtggccgaggactctggtgctggcccttaggagctgtgtggcccagcaagggctcctcagcctctctgtgccttggtttcctccatgtaaaaatgaggacgatggtagtgtttgcctctctttataaagcccttagtgaagactccagtgctcaatagacgtcatctgttatgaggtttatttctacgctatacaatacaaacacaaacaggtgaaaatgggcaacttggccaggggagtggttggtttttcatttttatcattttcattttttttttttttaccccattgaatgtttatttcatttgggtacatctttctttttctttctttctttcttttcctttccttttctttctttctttctttccttctttctttctctcttttttttttttttttgatggagtctctccctgtcacccaggctggaatgccatggctccgtcttggctcactgcaacctctgctttcccggttcaagtgattctcccacttcagcctcccaagtagctgggactccaggtgcatcccatcaagcctggctaatttttgtatttttagtagagacagggtttcaccatattggccaggctggtctcgaactcctgacctcaagtgacccacctgccttggcctcccaaagtgctgggattacaggcctgtgccactgtacctggcctgcagagtgactgttgggaggtgtgcagctcacggggtcggcctcactggtttgtgtcattgaatctggtagccatttgtctatatccctagtgcgatgttgggaccagttgtttgcatcaggctctcttcgctggaggttgattagggtgcccttgtcgagcagtcactgatgctgtcctaggcaggcagctttccttctctgtgtggagcaaattcaagatggtttagttcctgcccaacatgccacagtgagtctcaattcaaactgactttaactacaattataaccacagaggagcagtgagattcacggaactggaaggtctggactctaactgaggtggagttagcagctcaaacggcaaccccatggacttacctcatagtagcaaaatggctgccatagctcacacctcacatccccatgccaccaaacagagcagcacttttttctagaggtctagcaatgatcttcttgcatcctactaggtgtttttgtactattatgcccattcctgaaccagtcactgctgccaggggaatggggtgtaccacttggttcatggcaaggaagttagtccttggaggagtgggaaagagagaatgccagctcatccatcccgtggccgaatgtgacagagagaagctttctcacagagattcagacggaggaggaggcatggagcttgggcaactaaatggtgtccaaaatgtcaccgctccgaggttcttctagtagcagaggcactggccctcctgctcaggatacctgaagaggtgtcctggcctccctgagcaaggtggtttggagtctgcacatggtgacgaggttctgtcctctcattctcccatcacagagatatgactgtgttacatgggtcagcgagttctttggccactttctccaggagtccattcctgcctgttctcttctttttggtaatactgagtctcatctcagctaggaagtgacaatggacaccagcaaagccaaatgacatatccttccatgtggccactgtgtgtgcaggactgtgtccctcatcatgttagtggagaaaggggtggcacccaagaggaagggaaggtgggattccctgctcttgaggagaagctggcctgtctttgggaatggcccacacataaaagagagttgggaagccacagaaaaacagtggttagctcagggattgcgactcagggtgcagggcctgggatgtcctctcaagcacaagggaacagcctggtcatcttccttgcacctccttctccttcactgcctcttccccaggtagaaacaagatgcctgccccccaaacctacatttgtcctcactctgaaaggacacagaaggagataagactgcagggtcaggccgtgtgggcgcgtcggaggggttgggcatagggtgagcccaggcctctggcatgggctcccatttccctgtttcccaggagtgttccacagaaggtatcactgggaatctgccctcccagagattcccagaggtctggaggggacagcgtatcagcggttgtgtaaactgaggcatggagaggttggattgagttgtaaggctagaagtggcagagctggcatttgaacccacctctgtgtgacctcacgccttttaactccacctttgggccatgctgggagttgtgtaaatgcagcagaaggcagaatgcagctcaccagcaaactcggctgctggtaggacaggctgcagggaggtcagaggtcaccacttccctctctttgcttctcagtaggagtcatcccgacatcccttcagagaaaggagcagggaaggaggatagcccagcacttactcccttggtgatgtctgatgggacccccctgagccccacacttaggcttgaggtgaccccccagagctgtggttgtgaatatccccgagcccctgctcaaggtcacacttgttcccctagtgtctaagacagggaggaggaaaggggaagaggccctctgaggccccaggagcatgggctggcagacaggccagcacagcctgacttgggctgcccggctctccgcctgtgtgagcttgcccccgtctcagttccccagtcccttctgacactatgatgcttcatgagtgtcctttacatgctctagcccgcagctccgtgtggggagatggcctgcatgtgtggctggtgggagaaggggcctgcaggtagaagaacgttgctggcaccgccggtgctgccttgtgcatgagcttgcagacaccatccggaagtcagctctccacccccaccccttctccagaagaggagagactcccccatcagtagacaaagagaaagagaagaaggagatctctaatcctccggcctggtcagggcagtccatggggttgtaaattaggagggctagatgattgtctgggagggcctccagaggaggggtggctgagagttttgttgttgtgggcacagagggctggagcaagcagccactttgcactggacacatgcagcaggaagcttggggctggcacgaggccctggccccacctaagatgctcttggagaaagggcccaggactcagtagaggggctgagtctgctgtgatggatgggaggaggccagcaggttcttttcttgtgattttgtgtgtgtgagtgtgtgtgtgtgtgtgtgtgtgttgaatgtgtgttgtgcatgtggggatatggatatattggtgggtgtgcttgtgctgtcttggggtggtgatgctgtatgtatatctgcaagttaccttaatttttcaggtgtaggtagctgcgggtgcatgtatccctctgtgcctgtgtgtatgtgttggcgtgtgtgtcttgggctatggctgtcttggtatgagagaggatgtgcctgtgttgagtatgtgtattgatgtgtgcacaggtgacagtgacttgggatgtgaatgtcagtatctttgtggttattgggaagtgttaggatgtggcatttgggtgtgcaattatgttgctgtgttggcatgggatggggtgtgtgttgtgtggataaggatgtgtgtgttgtgatgggtgtatccatatgcatttgcctgtgttggaatgggatagggtgtgtgttgtgtggataaggatgtgtgtgttgggatgcatgtatccatatgcatttgcctgtgttggaatggaatggtgtgagtgttgtgtggataaggatgtgtgtgttgggatgggtgtatccatatgtatttgtctgtgttggcatgggatgggtgtgtgttgtgtggataaggatgtgtttgctgggatgggcgtatccgtatgcatttgcctgtgttggaatgggatggggtgtgtgttgtgtggataaggatgtgtgtgttgagatgcctgtatccgtacgcatttgcctgtgttggaatgggatggggtgtgtgttgtgtggataaggatgtgtgtgttgggatgcgtgtatctgtatgcatttgcctgtgttggcatggattgggggtgcatgtgtgttgcatatcatgatggcttattattacatagggtggatttgacctcccccaaggactatgaccttcaactttccttagaggagaggtatctgggttctgagactgtccttgcccctttttccaaaaccttcgctcatcactagaggggtcttccctccctaatgctggctcagcctcaggtggaagatctggcttttggggtgcaagttgggaaatgcagaaagccctgccttccagtatgcagctgtggcctctccagcctcaagcacctcctggaagaagctggggcttgaggctctggggtccccattcagggagcctctgttctggagctcagccagccttgtgcccggaggaggtccgtgagctccatgaggcaggggttgtgttttcttcagccgtctttccatcatgcttccctgcacggggcatagagcacagcagatgtcagggaatgtggtcaacttatacagaatgaaatgaaatgccttctctcagcacaaaaggcactttgcccagcagccaactgggatttagtccttcccaccgctcttcctgtaagaacctaaatttacagcacagggcctgccaccgtagacttttggtgggggttattgtgagctgggcaggttaccaggtgcatgagggagcgtgggggtttgagatggggtgcaggcatggtggtgtggctcggggatgaaacctcatggtgatgtgttctgtttgctgtcagcatcctcgggaccccctctcagggacagtggtgaccttggctccatgtccaacttctccctggatgattattctccttcacgagcctaagaggcggctctaggagtagctgttttctctcttgcctccctcctgttgaagttcaccaacagagtagctgcctcattcacttgtgcctgttggaagccaggggtacaaccttcaactgcggtcactgcctcttaggtctgcggagtgtttaaggcctaagccctgtggccagcacctgcaaagtgatcacatcgctgcttacgggtttagctgaccaagttctatggacacgatgaaggattaggggtgcaggcctggggcgatgggggtggaagtgagtctgactgagtttaccacaaggcagggatttcagaaaggcacccacacattctgcagccagctgggggtgtcgaccagagcctggggaccagacggcgctgggccctcgaggggtaaaggtcaatcagcttttcctgacctctgcatgcacataacataggaatctccctttcctgaaattccaacacatcttctcccagccatttcataaggtcagaaagaacaaatttcaagaataagaaggtagtgggttaggggagtcatgaattggatgaaaatcatgggatcatgattttcctggaaatcaccaagaccccaagtggcagctccgccagcttctgcttggaaatgtgtgcagccaggtgcattggggtcaatggtccttttttggttagtggttgatgacacgctgtcatctccaggaagtaggtcccatgggaagaatggcacatgggtccaggagactattcaggggagagagagcctgagcacaggagaaagggcagaacatgagtgcccaggagggagagggcaaagcggggtccatcagggtggggctcctcctcctgcccgagttccttaccaggaagcacaaggttctgtggaggcctagagggcccctttgatggctgtggctcttcggggaatttggatggaaagtggctggaacccccaagggatgcagcactctggagaacagggactgcctgatgagaactggggccgtcggggttgatgagagagcagtgatgtcagcccaggcaacagagtggtcattggaaccatattgtttccacgcttagaatcccccagtgacttcccattcatgaagtacggagttaaatctgtggcggacaaggccccatcacctcccactctccctggtctcactctgctgaggccctgccaccttgcctctattctcattccctgaagccagccctgtagtggcctcagcattgcctgctgctctctcaggcctgctctccccgcagaccatcctgttactggcttcatctcaccttcacctcaacgccacttcctctgggaggcctttccagggaccttagtaggaactatccctccccagtcaccccctgaagatgtttctctgtaggatttgcatctctgaggtgtttggagggcaccttgttcactcttcctggttttcttcttcactcattcattcattttctttcttgtgtatttgttgacttgcccctggtgtgagcgccaggagagcagggttggtcccttatcacatcgccagcacccacggcagtgcctggcacataatacagactcagtaaacacttttttaaaatgtgtggtaaaatacacgtaacaggttgggtgtggtggcttaggcctggaatcctggtgctttgggaggccaaggcaggaggatcacttgagcccaggactttaagaccagcctggccaacatggcaaaatatcatgtctataaaaattattttattttattttattattttattttatttttgagatggagtcttgctctgttgcccaggctggagtgcagtggtgcgatctcggctcactgcaagctccacctcccaggttcatgccattctcctgtctcagcctcccgagtagctgggactacaggcacccgccaccacacccagctaattttttatatttttattagagatggggtttcaccgcattagccaggatggtctcgatctcctgaccttgtgatccgaccacctcggcctcccaaaatgctgggattacaggcatgagccaccgtgcctggcaaagaattttttaaaaaattagctgggtctggtggtgggcacctatggtctcagctactcagaagggaggaggctgaggtgggaggatcattggagcccaggaggtagagactgcagtgagcaatgatcgttccactgcattccagcctgggcgacacaatgagaccctgtctaaaaaaaaaatacatataacatagaatttaccattttaggctggacaccatggctcacgtctgtaatcccagcactctgggagactgaagcaggaggatcacttgatcccaggagttcaagaccagctggggcaacaaagcgaaactccattgctgcaaaaaaaaaaaaacccaaaccaaaccaaaacaaaaatcagctgggtgtgatggtgcatgcctgtagttgtagctactcaggaggctgaggtaggaggattgcttgagcccaggaggttgaggctgcagtgagctgagatataccattgcactccagctttggtgacagagtgaaaccctgttagaaagaaagaaagaaagaaagaaagagagagagagagagagaaagaaaagagaacttaccattttaactgttttttttttgttttttgttttgagatggagttttgctctgttgtccagtctaagaaagaaaaagaaggaaaggaaggtaggaaggaaggaaggaaggagggagggagggaaggaagaaaggagggaaggaaggaaggaaggaaggaaggaaggaaggaaggaaggaaggaaggaaggaagggaaggaaacttaccattttaaccattttttttgttttttgttttgaggtggagttttgctcttgttgcctaggctagagtgcagtggcacgatctcggctcactgcaaactctgccttctggttttaagcgattctcttgcctcagcctcccaagtagctgggattacaggtgcccaccgccacacctggctaatttttgtatttttagtagaaatggagtttcaccatgttggccaggctggtctcgaactcctgacctcgtgatcctccgcctctgcctcccaaagtgctgggattacaggcatgagccactgcacccagccttaaccatttttaagagcacgatttgtggtatgagctacatgcacatggttatgttatcatcaataccacccatccatagaacccttctcctctggcaaaactgacactctgtacccattcaccacaactccccatttctctcgccccccagcacttggcaaccacccttctactttccatgtatggatttgagtactctaagtaccacatataagtagaatcacacagtaattgtccttccatgtctggcttattttgcttagcatggcctcctcaagattcattcatgttgcagcctgtgacagatttccttcctttttacggctgtatagtattctattgtatgcatatcccgaattttctttatccaattcatctgctgatggtgtgtccttttggctgtttcagtacacacttgaataaatgaatgacgacaaggagggtggatctctgcctcccttcccctgcacaagacaggagtggcagctttgaacccatgaaggccattcattcatggattgtatcctatgctactggctctccagaggccagcgggacctctttctgcagtaatgtgctgtgctatggggtctggaccttggccaagatactgagcatttctgagggagggttttggcgtcaggaatgggcctctgctcagaccttaagccactgggtagctactgtgtaccctgagggggtcacagccctttccacagcacctggagcagaggcaccctggtatagctccctctcctaaccctgcaaggcaagctgtgccacagccctggccgcacagcggcctgtgtgagcccagtgctctgccatccgggaaggaggtgagggaaggggagggtgtgaccccacagtgcctggagctcatgctgggagtgagtgagcacaaacaggcaccagcgccccgtgaaaaatgtgtcaccgcccacgacaagatacgctgcgtggtttctgtaggaaactgaaattccagaaaacaacccctgtggtccagtgtgttttactggaagttcagacctccccttcaagcttgccttgtgccttttagaaacagaatctctgtctcactccccaacccagcctaggttaatgctgagaccagggcaaagaggaggacttggcgataaggcttggggctgggaagatgctgtgattcactttgatgtcttggaggggcaggttgtgaggatggaatgaggaaggggaagaccccagctcgaacgccaagcttcggtgggcctggtgggctggccaagtgtcatagctgctgcctgcatggggtcctgtgtgccacgccaggcacagggcaggtgctggccaagtggatctcccccgccactctggcagttcataaactgggacctggggcgaggggtctgcattgagctgggaacacaaacctcaaggcccgacttgtccagatgtcacttggtggtatggactctgcaggggttcgtgagggctgtggggttcttgatggtggttgggagagctgggaaggcacggagcagcatggagggatggagatatggtcttgggggaagctggtatgctggacagaagcagcaaatgtcgtgagtgcagagtagagcagcgcttgggagggcctgggcaccgatgcccatcgacacctaggcagagatggtgtggaccctgagatcaacagggagaagaggcatggggagctttggctttgggggtgcaggtgcagagagggattccaggcaggagtgtgctcatcccattcccacctgagaatgtccagaggcgatgaggattgtcacacccaccccataaaggggggcccctccaggcctcctggggctttctcccttccctggcacctggaagacccagatacccatgacccagggccctgggggactgctgcagacccactccctgcagcaggatgtcccctgcaacatggtgctgttgaccaagccaagtctccaaacatagacataaaagaaaggaatgaccgggcacggtagctcacgcctgtaatcccagcactttgggaggccgaggcaggtggatcacgaggtcaggaggtcgagaccatcctggctaacatggtgaaaccccatctctactaaaagcacaaaaaattagccgggcgtggtggtgggcctgtagtcccagttactcaggaggctgaggcaggaggatggcatgaacccagaaggcggagcttgcagtgagccgagatcgtgccactgcactccagcctgggcaacagagtgagactccatctcaaaaaaaaagagaggaagaggaacatggcaggagtccccagcctgctgcaggctttatcacacctctgcttgcccattagttaccaggaaaaatcttcctcctcaaagggagagcattacaagccaatacacctggatccctattctatttctggggtgcccaacaacccttggctgatagaggcacattccccaaagggtatttggtagttctcaattaatggaatgaagccatgcacaggtgtacccattccacacctgggtattccacacctgggcaccctgctcctctggggacgctcagcctggcttacagctcccaccgcccacctgcctatgtccatcatgggtgtgataggagagggcacctcagagccagccagggatgccagaggtggatggtgcctgtcctggaatctcggtgcaggttgtagaggggatagagtgaagtcagcttcacccagactgtccccagcccacccccacatcttccccacatgctattcactgctagaaacataatatttagctgacggcaaggaagccagagaaatcagcagcaacagtggtctccagggggagagatgtaaccaaaaaacaaagtgtacgagttagagtcaattccagagcctgtggctgcttcaagctgccgtggacagcctcctcccaggtgagtcctgagggaggggtttggggaggaggctgtgcgattccagggggagcaggaggctttctgtctgccatcttccctatgatttttggcttgttggtactagtttctttagctacacccttttttgaggaagggaggcttagaataaatttctaatttttgaatagtgttagatttgcagaaaagttgcaagaagagtccaaatcttcttatactccatgcccagcttcccctgttgttaatatcactgtggtactaatatcacaacacatgaagcaatgttgatgttatcattaaccaaagcttatactttactcagatttccttagtttttacctaatgtcctttggtctaggatctcatccataataccacattacatttagtttttttttttttttaattaataaactttgttttttaagagaagtttcagatttacagaaacattgagtggaaagtacaaggggtggccatatgcctccgaccccacacctcccccactaatggacaacctgtgatagtttcttagactttccttgtttttgatgacctcaagacagtctttgaggagtcctggacgggtattttgtagactgtcttttttttttttttttttgagatggagtctcgctctatcgcccaggctggagtgcagtggtgtggtctcggctcactgcagcctccacctccctggttcaagcaattctcctgcctcagtctcctgagtagctgggattataggtgcatgccaccacgtccagctactctttttgtatttttagtagagatggggtttcaccatgttgtccaaactggtctcaaactcctgacctcagacaatctgcctgcctcagcttaccaaagtgctgggagtacaggcatgagccactgcgcccggccttttttttttttttttagagattgggtctcgctatgttgcccaggcttatctcaaacacctgggctcaagcaatcctcccacctcgtcctcccaaagtgctgggattacaggtgtacgccaccaggcctggcttagaccgtttatcagatgttcttctcatggttagactggagttatgggaggaagtttgtgaggaaggccagggagataaaggaccattctcatcacatcgtgtcctattaatctggcttatcactgataatgttgatcttggtcacctggctgaggtagtgtctgtcaggtttctacgcaggaaagccacagctgttttaaagataattaacaggcaggacaagctaaataatttatagagctcagtgcaaaatgcaaatgtggggcccactgttcagtcacaaagaatttcaaggcagaaatagaacattaaaccaaattcagggtgcttttaggcaggggctcctgggtgacgtgcacaggtcgcagtcccatgagactggtcttgtttgcagggcaattgtcagatcacccagatgcccctagagctctttctgcatggagagagaaggcctgtgccagctgtccttgatccctggacagttggaaggggcagatggctgaggaggatcctaggtacccatagccatgtgggcaaaacagtatcacgggcagaggatgtcatgaacatcacaggtgtctgcagaggccctgctgaggcacctgcctggtaacatgaaaaacttgaccggaggtctgcctggatagagagagaatggttgggtgtgtgcaggagccagtggttagtaacaaacagcagcaactctgtaatttttttttaaatgctacttttatttttaagtttttttaaaattattttcttctttttctcagtgctcaaagcagcattttttttttctggaacaccttagaatagcttatttaccaaatgctacatgagcctttatgctgggcaaaccgaggagctccattagagggggacacctggccttgaccgcccccatccctacagctttcttgttaggagaggagggcatcgcgctacctggtctcaggtgcatacctgcggaagcagagtcctcacgatagcagggagaagagtgtagggagaagagtgtacagctgccaaccggcttctccttgctattattcacccagctgtttagagaaggagagagtatttctaatcagccatatggcatggagttttatttgccttggtaagttaaaatgtacattattggtcagcatcttgcatgcaaattttgacattgcattccaggagtacctgcggaagagagtggcggcaggtcggatctgtgtaattacattgctttgtaggcttgtaacattgccatcactaacgatgcccggtatctcactgcgacggctgcctggggatattgccgtgagactcccgtagccagagaaagattatgtaaacatgtgtgatctcaaaagtgagtaatgaagttgagtacttgttgcaaaaattaataaatggctggtttacacgtgatggaggagtcccttgtgtgaaaactgagtcacccagtgtagtgatggataaacgcacttcgaggcacaggtgacttaaagaaattcatccttttctctactgatgtgatcaaatggacaattgcagtccacacctttcactccctacttgactaatatgaaatcatcacgaatatatctttctcctgctcttggcctgtcagaatcttaactcttgcttcaaaggatggcatgtcagctctatggggttacctgcagtttctggaatggtctatgttgtccaatgctgcaaggaagtgctccaaggtggccttggaccgatctgattctgccccctttctcacttgtagttctcaagaataagggtagaggccgggtgaggtggctcacacctgtaatcccagcaccttgggaagctgaggtgggcagatcacctgaggtcaggagttcgagaccagcctggccaacatggtgtaaaccgatctctactaagaatacaaaaaaaaaaaaaaaaaaattagccgggcgtggtggcacacacctatagttcctgctacttgggaggctaagccaggagaactgcttgaacccaggaggtggaggttgcagtgagccaagatcatgtcactgcactccagcctgggtgacagagtgagactccatctcataataataatagtaataataataataataatggtagaatgttctggggatataacatcttgagattagggggagctggccaaaacaccctggcctctgatacagttccccctagaaattagatatcctttggtgttttagcccagcgtgtcccatggccccagagtatgcaaccctgggggctgcttttccaagaccctcagttgtagtgcaagtggcttatacagacaagactacatccaccccaggaagctttcttgagccttaggggacccacttgcaataaatcttaggcttctgtccaccttgctgcctatctgtaagtaacaaatctgcttcacataacctgttgcatgtattctgtgtcattgaacttggacaggctggcacccatcctcacacatgcctccaggcctttacacatgcaatttgttcactcatatccttggagccgctacaatgtatcctgaagttattactcacctactaaatgtcctttgagtcacagctcaagtgccacctgctcagaggagacgtcccgcccatcctgtctggaaaattaaccccctgcccttctggcccatccttccttgatgatgcttacctttctgttttagctgtctctcctccagggatgaatgttcgtgaaatcaaactgaccagggtccagatctcagttccaccaggcaccagcttgtgtggccttcagcaagatactttctgaacctcaaatgtgctgtctgtacaatgggaaaacactagtttctagtttgtaaagctgttaggatgagatgatgtgcctggcccatagtagctgctcagtgaatatttgttccgacatggatgaaggaagtgagacttttgtgatgtctgactatttttagactggagaggaagagggaggcatatgggaaagaaggcatggcagagacaaaggtgaagcacattggtgagctaggtgtgtttagtggatgttgacgccatgtggttgggaatgtgctgggaaccctggaaaaggagactagggccagactgtggaaggccttggacgccaggcaaggatgacatcctgcaagctgggaccagctagaggctcataaaccctctttctctctctctctctctctgtgtgtgtgtgtgtgaaatgattagggggtttatagcatggctaccctgtgagcactgtgtagggctccatattgttatctgggtcttgttcctcacgttttccactccctcagacacccgcccttttccccacctcctccagcagacatttgtggacctcctgggtcccagacagcagtgtggccgggtcctgtgtgaactcccccaacccctccccatcactctgtcggggtgaaagcactgatgtgttgtcaagggaggatattacacgaagcccctgaagtggtacattaaagcagtttggattttctcttactgctaacattgattactattaattaaggttgatatttacaatcagagggagtacaggagcagatcattttttattaatcactattctggattcatcatcagtcatcattatcaaaatattcagacagtggacagtggctgagttttaaaactcaagtaaatgataaaattaaactacattagagagtatatgttctctgtgacctctgtctttcctagttttccctcttgtcccccaatggtctcagcctcctgctgtgcattctccccccacatcccccctttcctctctcctacctgtcccttcccttcctctctctctcctttcttccttttcttcactataaacagcactaccctataattctgcagtttgcttttttctttcaaccatgtggcttcaagataaccttatttttgcgttattgttgttgtttggttttttattttgagatcaagtcttgctctgtcacccaggctggagtgcagtggcacaatctcagctcactgcaaccttcgtctcccaggttcaagcgattctcctgcctcagcctcccgagtagctgggattacaggcatgcaccatcatgcccggataattttttgtagttttagtagagacagggtttgactcagatttctcttagccctgttcctgtccgtgtaacatagccactggtcatggtggctcacgtctataatcccagcactttgaaaagctgagagggaggattctttgagaccaggagttcaagaacaagcctggacaacatagtaagaccctatctctagcaaaaaaattaaaaaatataagaagaagtataacaggccataaaatagatatggcctggtattttgtatgtatttttagccattccccaattggcgggcatttaagttattccctcccctttcttcccactgctgccatagtcagtgccacagtaggcatcttgtctgtgtcttggagcaggcaggaaagcagtctctggggtaggcatgaagaaacgggggtacagccacagcccactgggctccccagccccttctccatgtccttcctggactctagccaaacccaaccccacacgagccccagacatggccccgtgtactggctctgctgtgctttaggaccagccgctcctggaatgcttgatgaggggtccccctttctcccctgtctccccatgttcagttcctgcccacatctaaaggtatggggaggtgcctgctcctccagggacttaaggttacctgctttctcctatgaagctcacccaggaacttgtcactgtagagtgaaatgcattggtagctttgttctgatgatttttgagccccatgaagacggcaacggagtcgaactcatttgtctctccccgggtcattacacatgactaccaagggctcgtcttctgaagaacaaatgcggctgttggttttcccacgtgttagtaagagagtgagtggttcttgacattcttcagccttttcctccctggggttagggctggggactggggcttctcccaccttcttccctctgtggccccagtcatcatccactccccagcgcacctgggacccctgaattcgctcttactgagctacatgaagacttttggccagccgtggtgttaatccgtggactctggccattagcatcctggcatttggaatgagaaaagtgaaatttaggggatcctggtcttccttttaggagtctttttttaagtaggtaaacaattgtaggtaatttaatttgtctgttaatggcgcacatggatttactaagagggaaatgtcactgggttgtggacacacactgcatataattcgatgagaatcggcctctgatgggcagcaataaatgtcaaactgttcaacattgattgttcgtgaaggaatattgcttaacaatgaataaaatacctttctgagtttcctctattggcctgactttaaaaggaaatagggagatggactccctctgtggctcacggccgcttaggcttggaggcagggaagctgctgggaaatagactgctgggcttctgttctcaaacaggtccattttagtggctcctcaagcccgcctcccagagcagagggatgaatgcttagaggccctagtggctccccatgtgatttgcgaacttctccggtctcactgggcctgcctgcctcttggactccagggcctgtggctctgtggcacccactactctcctgctctttctgtcactcctcagaatgctccagtgtggtcctgccttggggcctttgcacttcctatacttgctgggtttttttttttaatagagatggggtcttgctatgttgtccaggctgtactgaaactcctggcctcaaatgatccttctgccttggcctcccaaactactgggattacaggcatgagccatggtaactagcctatattttctttgttaaggtccacttgtctttacttttccctgaccacccatccaatgtcaaagctcatcttggttgtgcccttattctgtctgtcccgaatcatgacatcacccttatgtatttaactatttggtattcttttatttccattgtactgacacgttctccatctccccactagaatgcaggttctatgagggcaggaatggtgtctgttttgtccagttaggtagcccagggcctagagtagctcatgatacaggaatgatatacattcttcatgatattcatacacagcagtaagtactgatggacccagtgtgttgaatgaatttctgcggagtcgtatgacatgcatgcattttatgaaacagcaacctcccaagacatgaaaaaaatatgcttgaggtttctttcaaatgaatctccctttaagcagaaatttctgctttgtggcgtgaagaaagcagagtattccagcagtggttggttccttctactttttagacaacccagtaatttgtttggagtgttgttgggtcagggggttctcactgacaggggctgtgtctgtcccctctggaaactgaaatctcctccactgtgctttgctgaagacagcagtggctgggcacaatgatggcaaactcttgagcttatcagaagaataaaaggacttaagtgaagtggagatttcttggtagttatcaccttctagaataaaaagaaaacctgattctttccttcatctcaggggatcctctattgttataagtgacctcggtgagggaagagagttttcttactctacagaaataaaaatctgtctgctttctctagcactgaagaaaaatagtccttttttcctttttctttttagaaaagcaccttgcagcttctgatgattgaggacggggtgggatcctccattgcccaaccccttagctccaccactctgcagacctcggcgtccttgaaggagctcgggaacagagatcagcatgtgtgggtcaggctgctgatggctcacatttaagaaagatggttcatggataatccttggtgtttttttttttttttttccaggataaagttttatgtttgaccctgagaaccagatattaagaaatatatgctatgaagtcattttggctgatttaatctaaacttcctgtatgctcttaggcagaggtttcaaggttgggagggtcttacgatctaactctgccccacgcggggttgaggaatgctgtggggctccgccagcttctatttgtataagtccggggtagggggcttcctgctgtctcttgagggggcccattcagagcctgaggagctctgatcttagaaagcctttcagatggggggatcctagtgaagctcatgggttttgggctcagtcaggcatggtctgagtctcagctctgtacacataaactgctggatccccagccaagtctgatcccttatgtgtataccggggaataatagtacttaccttagatgactattgtgagaattaaatgatgattatcttccttctaaacaacagcagagcacatagcaggcactcagtaaatgctctctctctttttaatattgccctgaaatgtgcatggtcccaggattccttggggtcctgtaagtcgaactggattctcccaaggccaagggacaaaatgtggtatagcttcgagtcttgagccttgtctgcttttcttattctgtgcccatctgaaccaatgcacttagtgcacaggacctgctgggttgaccaacgatgcatcatctgtgtaggctcagaggggctccctctccttttggaaactcatccttccgaggccatttttgcctgtctggggaccacggattctctggttcccactgagttactcatcactgtccaatccctcaagtcctttctcagaggcctggtgaagccctgccctctccccagtcctgcattgccactctgggattgtgtatcccatatcagttaggacaacactgaccgctcttataaatacaccctaacatctcagtatcaagacaccacagtttacttttctctctctcatccggagctcaatcggtgttgggcacaagcagcttttatttagggaccaggccagtggaagcctcatcattttcagtatacagtttcctgggtcacccaggacattgagatccagctgtcaggaaaagagagcaccatgagaatggagcaagagactcttctaagaagtagcagccttcattttgtccaaattccaccggctgaaagtcagtcacgtggccccagctaaatcagataagcctggaaaatatctgcggttgggaaactgcttccagcaacgaccctaggtcgtggaaggagacaggaattgctagttggctgctgtttcgactacagaccagatgtggaaaaggtcaacaactgtttgtttaattgcatcactcattttccccttggcctggtgggtcagggtgctgtgagggattccttcattcaggggccctcacgcacaccccacttccccagcactggccacctgcgcttgttccattcatgcctgttgggtttttgtccctgtcactgataaaaagcagtccacgaggcagcctcgggacatgtgccctgccacatcccagggtgagagtccctcccttccttgtgacctcagcacttgtttctgtaccctttgggtatggctggttaaccagccactgatccacttctttgccttgcttcagtttcacatttctcttttttatctccgtggaaatcaaaatgccctgctgagatgcagacacctgatgtctaatgcaggtctcggtccccagccttcagggctggttccaagggagcccgcgctgggctctggggattgctgttcccccttctaggcttgcctcaacttttgtgaaaaagtaagacccatgctgaagtcagtctcaggatcgattgtccatgacaattagctttccctttctccacagttcctcagatatcacagcagcaggtttcagcactgctttcccaagctctcccggttccatggtgccaatttcacgggagtgtggagatgaggattctgctggagcagacatgttcttcctgacagtctttgtcatccatctcaggctcccgtgggtcaacaggtctctcttccttccccgggacctctccttgcagggcagacagaacaatcccttctcctcttctccttccccaacgtgatgtcattgcttcctgcaccaaactatagttcctttctcagtctgtttgttttgctctgaattgaacttttaaaaagggttttttaccatcattctcagcaaactaatacaggaacagaaaaccaaacaccggatgttctcactcataagtgggagttgaacaatgagaacacatggacacagggaggggaacatcacacaccggggcctgtcgtggggtagggggcaaggggagggagagcgttaggacaaatacctaatgcatgcagggcttaaaacctagatgacggattgataggtgcagcaaaccaccatggcacatgtatacctatgtaacaaacctgcacgttctgcacatgtatcccagaacttaaagtaaaataaaaataaataaataaataaataataaatggctttttagcctgggcacagtggctcatgcctgtaatcccaccactttgggaggccgaggcaggcagatcacctaaggtcagaagttcaagaccagcctggccaacatggcgaaacaccatctctaccaaaactacaaaaattagctgggcatggtggatgcggctgtaattccagatacttgggaggctgaggcaggagagtcgcccgggaggcggaggctgcagtgagccgagttcatgtcactggactccagcctgggcaacagagttagaccctgtctcaaaaaaaaaaaaaaaagggtgggttggggggctttttagctgcccttaatactatattttttctttccttggctttcattaaagataagatcatttcaagtcccagtcacttatgtctgaggttccctaagaacatgttccttcttgtttccatgttttattcaaatcatcaatcaattaatctattcacttaacacatctatgcatatgtgcatgtgtgtgtatacatgtacttgtatgtacatacatgcgcatgagtatgctagatgcccactatcgtcttttcaaatctcatctctctgggggagtcacactggtttttctggacccaggcttcttccctgtcactgggatctctctggttgcacagtcggcattatgacacgtttgagagcatcctcatctttttctgggtcatttgcttgaccagcctctcgtgtcctggaatcctacctctcttttctgcaagtattttgaaccctggtatgttaaaatttaggatacacattggttcgtgatgaattacaaacatttattgagtttttaaaaaatgccaggcagtgtgctaacttattaaatggatttaatccttgtaacaactttttagaattgagttctttttaaaaattttgttgattgatttattttcattttttatttctatagtttttggggaacgggtggcttttggtaacatgggtaagttgtttagtggtgatttctgaaattgtggtgcacccatcaccccagcagtgtacactgtatccaatatgtagtcttttatccctcacccctcccgccctcaccacctccccaaagtccatcgtatcattcttacacctttgcctcctcataacttagctcccactgataagtgacaatatacgatatttggttttccattcctgagttacttcccatagaataatggcctccaacttcatccaagttgttgcaaaagacatttgttccttttgatgactgagtagtattccatggtgtatatgtaccacattacctttatactttcgttgatcagtgggtacttaggttgattccatatctttgcaattgcaaattgtgctgctataaatgtgtgtgaatgtgtgtgtgtgtgtgtattgtgtgtctttttcatgtaatgacgtcttttcctttgggtagatatccagtattgggactgctaggtcgaatggtagatccactttcagttctttaaggaatcttctgttttccacagtggttgtactagttctcgtaacaggtaacagctttctgaggtagatactgattttatcctgcagtagaaaatggggatctgaggttctgaaatgttaagtaacttccccaatgtcacacaggaagtgctggagtctggatttgagccggtctgttttattccttctctgtgctcctaaccattgtcccatcactgtgaccccaacctacctagcctcacacacctaggattttgagaactctaagacaaacataattgtagttgtccaagattcttgcttttttttttctgccttaactaattcctccctattagttagaactaaatctagagttttaaaaatattccttcattatattctctacggtctggaaaatgaagttatcatcaagataggtcaaggtcttgtcagatgaatgaaaacaacagtaatgatgtattttcctccccattaggtctgatgcctcgctttccagccagctcaaagttctaatggacggtcagagtgaaatgttctatcagtcccttgtccagccccccagctggttgaattgggagttttgtgtttgcaggggaccctctatttccccatctgtctgggtgggcttcagcaagcttctagtatcagcatctccatagcgccctcctctgggtccaccccttgcttggtgctgtatgcttcttgctttgggcagacaggagcctggggacaccactccttcaccatttctgttaggtctggcctttggggtccagaagtcctggggacaggggtgccccatgttctgactcccatcctccaggctccagccccaccctcactgtgaggtttatttagtgttctgtgttggcccagtgcccacctcattggaactggtgacctccttgacaatttgttttctcctgtgcatctccaggctcctcccacactctcttctcctctctgggttgtacctgttgtacactgtgttcctagggtgccaggtcagtgagcaaggtggctccccttggcaggtcagctggcctcccggaaaacatggtcctctccccttctgggaaatgcatcagagtcccagctgggaccttttccaaggcctcaagtttccttcaggtgtcccattggcacctcaaactcagcaggtcccaaatgccgagtcttccgaatgggtgtctcctgccatgctgcctggcggggtgaacagaccccaccccaccccaccccaccccacccatccaacaaccagaacacccagggcatggtccaggcggttccttctcacaccccttggagacccctctttctgcttcttaaacaattcttgcgtttgtccccttgtctgtcacagatctgaatctccacatttgaggtcttcatgggtttccctcttaaacacagtttccgtctagttcgttcccggtagcttgctccaaaccctttcccccagatctctggaaggatctacctaaaagccaacctgatcatgtcacttctcagtttaaagcaacccatgggccttcagaaaaaggccacagtctcatgagaaccttcagggtccagcccttgcccacctctgcagctgtgcctcttggtccccacagtctttgttctggggtgggggtctgactcctgcaagtttccccaccctgtattccatcattcctctgggtctctgtgtgttcagctctctctactggaaatccccctctacctcaccatcccaattctttgccaggctgacttctgccttcctttggaagtcatccccctgaccccaagtctctgttaaacccagcccatccccgctggtgcaccctgccccatcgaatcacaggtgttctctctctcactccctcctacgcctgaccacctggacacactccatatactctgttgaatggatgaatgtatgtcccagaaattcaaattcatcagtgtggggtgttttctctcattttgatttttttttttttttttttgagatggagtctagctctgtcaccagactggagttcagtggtgtgatctcagctcactgcaacctctgcctcctaggttcaagtgattcttctgcctcagcctcccgagtagctgggattacaggcacccaccgtcatgcccagctttttttttttttttttttgtatttttagtagagacagggtttcaccatgttggccaggatggtctcaaactcctgacctcgtgatctgcccaccttggcctcccaaagtgttgggattacaggcgtgagccaccgcatgcagcctgattctttaatatatcaagtaagtgtttcgccccatccttgttctttctctgtgctcttagcccatctctgtgcaggacccatgagcttcttgtttcgtttctttgagcaagtagcgcactttcttttttcttcttcttcttcttcttctttttttttttttgtcttctcttgatcttttttggaaagactgtggaactccgtgtgagagctcttaaattttctgggactcaggaaagtggggggacaacatctcttctttgttataaggattaattactttgtaaagtgctataagctttgtagagtagaaaatcaaaccttgttgccgggcgcggtggctcacgcctgtaatcccagcactttgggaggccgaggagggtggatcaccaggtcaggaaatcaagaccatcctggctaacatggtgaaaccccgtctctactaaaaaatacaaaaaattagtcgggcgtggtggcaggcacctgtagtcccagctactcgggaggctgaggcaggagaatggtgtgaacccggaaggcagagctttcagtgagcagagatcgcgccactgcactccagcctgggcgacagtgtgagactctgtctcaaaaacataaataaataaataaataaatacataaatacataaataaaataaaataaaaaaaggaaatcagaccttgttaaggttccacccctgcacgtttccttcttcccatggtttccttcaagcctctagctatttttttggtaacagctttattgagatataattcacatatcatacagttaatgcaaagtgtagaattcaatggtttttagtctattcatagaattgtgcaaccatcaccacaatcaattttagaacatttctatcatcccagaaaagatactctgcaacctttagctagcaactcccagcccaagacaaccgcacatctctttcctgtcactatagatttactgattctggacgtctacttgctgttcttaaagctcatctctgtgcaggacccatgagcttcttgtttcatttccttgagcaagcagtggatctttttttcttctttttttttttgtcttttcttggccttttagcaaagactgtggaattccgtgtaaaggctcttaacttttcttgaactcaggaagcaggcggtggggtggggggaaacatcttttctttgttataaggattaattactgtgtttgtaaagtgctataagctttgtaaagtagaaaatcaaacttttgttgattttctaattgttccaaattaatgtcattttctcaggtttttttcttaatttgggatacctcattagcaaaaaatatcaaatttcagagaaagatgttctaagcctgcttttatcatatctccaacctggagaacccatagcaagggaagatgagctcagagaggctgtggaagttgctccgagaccagtaaaggtgtgtttcattaggtgggggttggcgtcactattatccatcaggaaagggagagggtgctcagtctgccagtgacacatgtattttctttctttttttttctttttaaaatttattttgtttaagttccgggatacatgtgcaggatgtgcaggtttgttacataggtaaacatgtgccatggtgctttgctgcacctatcaacctatcacctaggtattaagcccagcatgcattagctatttattctgatgctctccctcccaacctccccgctgacaagccccagtgtgtgttgttcccctccctgtgtccatgtgttcttatcgttcagctcccacttaaaagtgagaacatgcagtgtttggctttctgttcctgcattagtttgctaagggtaatggcatccagctccatccatgtccatgcaaagaacatgacctcattcctttttatggctgcatagtattccatggtatacatgtaccacattttctttatccagtctatcattgatgggcatttaggttgattccatgtctttgctattgtgaatagtgctgcagtgaacatacatgtgcatgtatctttataatagaatgatttatattcctttgggtatatacctagtaatgagattgctgggtcaaatggtacttctggttctaggtctttgaggattctccacactgacttcctcaatgggtggactaattgacattcccaccaatggtgtaaaaacgttcctatttctccacagccttgacagcatctgttgtttcttaacttcttacatgtattttctataataactcatctcatctgtttttggcctacttggacttggtcctagtactccacaaacatttccttggctcagataaagggcaaatgctgataattcacctaaggagggaataaaactactaagtagaaggaacacagttcatctgctctagtatttaaaaattacaaacttaaataaagaaccagtggccattttggtctattgaatgataacaaatattaaaaactgaaactcctgcctgccagggatacagggagccaggacttccaacaatgctggtagccttctaagtggttgaaagatctgtagaagacaatttgtcaatacccatcaggagtaatgacacgttaaactcgttgacccagtaattctgcttctgagaatctattttaagaaatttatccaaagtatgaaaaaagttacctgcgtggaaatgttcattataacatcgtttaaaatgccaaaaattaaaacaggaattgtgttaaaatgtatggcactggggcattccatggagacagagctccttgatggacatgatgcagccatttacaatgatggttttcaggagtgtgcacaagaacaaaagaaggaaacacaactgaatgtggaccaggggccgggccatgtgaaaagctgtgcacagtaaagcaatgggagggagaaatgccaaaataattactgcaggggctttaaggcatagaactgatgccttctcagtctctctctctttctctctctctccctccattcctccctctttctttttcttttgtccatatgttttatgatgtatgacattacttccataaaattttttaagaaaattagaaaactcaaccccctggtgcatgttaagaaggtcaaacttactgttttgttcttcaaaaacctgaagtcctgaagtgaggaccaaagagatagtagtaaactagcataatgatcacattccctggcattctatagaaaatgacaatttcccccattccctgaaacaaatcttgactaactttgatagttcagcaattagaactttggcatacaatctttcttcttcaactcctataattagtggtctccaattatatgaatcaatttcaatttctataaatcagatgatttagagagaaggctgttcaatttccttttcaactgtatggtttcagcagcaataaaactctcagcttaaaatatcaggatgcaacttgctccagaaatattacccagctcatttagggcttctgccggccgccacagcagttcccaggtttctaggtggtaccacttatctgtctgctcctgagccctgttcaattcttcttcatgggatctgacatctacttacagatttccctcccagtgtgggatgactatccctagaccttcctggtgttctaacagaaagacccagtttggacccagatgtatctctctaatgctagttagcaggcacttttagtgtctccctttttttcagtcctgggtttttcaatgtcagtggccctctaaggtgttctgcaggatgtgaaacctccagcctgaatctcctctaagcctggcttcgggaagtgcccgttgcaccctgctactttgtgaggactcttcatgaatcaattcctgactcattcccggaatctggagttgtggtttctttttctcctttagtcctttaatgtctgaaatgtgatttctttcatctcacaaggagcaagtcttattattaattttaaaaattcaaaaaggaaaattatttagctatttttttaattaaaaaaaaaaaacaaccctgagagtctcaacagactcttctgagcatcgaatcacatagacactttcatgtggcattaactcttccccattcgctaaaaggaaagcaagccaggggcagagggcgggttgaggggtcagctggaggaatctgtgccgaagagagttctgggttgcaaatgcacagcctccctcccctttcttctccccttggaggagataagtggccaaggcttcagtttgatgctaatgtggtttttagcaagatgtctgcttttggttgaagattggcctatggcttttatagtattcttaaattcagcttatgttgaattattattgttcctcattttgtgcatgacttccagttcccgaagcattagagtctctttaagtgctagggctgctgactgaggtttcttgacaaatagatcatggaaaatcaggacgttatatactggcctgcccaaggtatctgcaagaccagcccccttgtggaatcactggggcagagaacccacagctcaagctctcttttgatacctggggctctaaagaaatgtgtcagcaagtcttccaaacccaaaggggacaaggcttatctttcctggggagctcaattcaacagggaacagaaaacaaaagacagaaaccagccatttgtgacttgtttatttgattgtagccattaacaatcatgcattgaagaataacagtttcaaaacatactcacaagctgaggtgtggtgctcaggcttgcagtcccaacactttgggaggccgaggagggaggattccttgagaccaggagttcaataccagcctgggtaacatagcaagaccccatctctacaaaaaatttttaaaaattagcgaggtgtggtggtgcatgtatgtagtaccagctgctagggaaggtgaggtgggaggatcgcttgagcccgggaggtccagaatgcagtgagctatgattgtgccactgcactccagcctgggcaacagagtgagactcggtctctaaaaatgaaagtaaaaataaggaaaataaaataataaaaacgtacaatataatgttgagaaaaaataaaatataaaactgtatgtaacttgttttgtttatattcgaataatactttaatcagatttaaataaatatgattagaaagaagtctataaaagtgatactgacagtcgtcgtcaggtagtagaatctgaagttattttcatttcttttcatacctttccatatgttccagatttctgcaaatacaaacatggaatactttgctgaatagaatgtgaaagtttgctgaaaaggctgaagaagtaaaacaaattctgaatttccaatatggtacttggtcatagattgctctgacctgatttgcaagttctcaaagggtgcacactctgttcttgtctgagtcctaccagggccaagcatgtgcttcaaacctacatgcttccattgagatcctcctatgtacctaatgcatatttcaattgagtttggttttggaggatctgacttagtccaagttcatgtgaacctgcagagaaaagtgcacatgattggaggataaaagccattgctaacttttttttttaaccaagttgaccagttgttagaccagaaaacagttttgttgttgaataaacataatctcttcgttcatctcttcttgataagccctagaatggtgagatgactccctgtggctagcaatagaagatcctattaggcaagttttcttcaatcaggatgaaagagtcatacatattcaaaatgaacattttagaatatatagaccctttcatctccaggagggggttgtgtatccttgtttagatcttcattttacagatgagaacacaggggtctgaggaggaaaggggccagctcacatcccttgctgaactggcagtggatacagaatgtgaaccactgagtttttagggtcactgtaggctcccccttgccacagagataacagcgttcaccacttagataaagaaacttccatgctggccagcagtgggcattttcttccttctcccactcactcttcctgtaagcagaaataaggccctattgttatccaaagggcactctctcctaagtatgtcctagggcaccccaagatgatgatgttgtttgctagggtccactaccaggaaatgtcaagtattcgggattgcccacgaaagagtttattttggtataagaaaagatgggcttttaaaacttaaagtgaaaactttgggtttggaagggaaaatgtaaaagttggttataatgaggactttgtttgccaggcgccccagcccggtgactaatggctggctgcttgttggagaaagctgtctttaggggcgttgagggtgttagcaatgaacaggagtgggcaggcactgaggacccgggacccaggttaggaggcgggggaaggtggggtgaatgtgcaactccaatgagaaagtatttaactatggctccagtgtctaccaaggcctgtccaaggaccttggttgatgtcgctagagacaatgttgcctatcttcatgaaaacaaacggcaagtcctatcctgactcaaggagcagggtgttttggataattacaattttactccccataaactcctttaaaatggcatctaagagaagcgactttcagaaagaaaagaattctggggacattgttcctttcacagcacaaggtgaacaaaataagacagaaggccttctgtctcctgttcagtaaatttttctgggttaagattgttcttccaagtttgtcttcctggagtgcgtgagcctctgcagccaatgacaccacagtgtgtgttgtggggagttccagagtccctctccagttatcaggtcgatacatgtacctggtaatacaatgccaatccatggctaaaaatagcttccttttgttgcgatctcccagaacaaagggatcagacccacttcatctgtgtcccctgccctcccctcccggcagtcctaaggcaaacagtttgtcttttccctcaaatggatttttcatttaaaaatgggggagaatgaaacctgaatagcatggagacctgtgcactaacaaaaaattcttttgaaataataggtgctagaaatcacaatttcagcctcctgtgtcccccaagccagtttgggttgaaccagatgccaggacttaagtcaaatgtgtggggactcctctgtgggtcccttgggggaaactcaatgatttcttttcctttccttttcttttttttttttaagtgttcctcaaagatatacaagacgttactcctgataaaatcccgttagccatagttcaactttatattccttgatcagtcttgtgttttctcactgacttttgctacagtttatggctctagattaagtaccagaacacagagttttattttcctttgtctaagtctatcttcctttgcctggctcactaactggatatatgtacataggcgatgggcacagaatgtgggttgtattttgggtgagggtgggggtgggcaggtcggatcatgaagggacacagaatattaattagacagaaagtgctctctgtgccttatctgcataaagaaagataaagcccatgtaaataatatgtgtgtttcccataatgaatgtcccctttctctccatttctgcatagtattagaaattgcgtttttattatatgagacattggatgcatgccaacaagtttttcttttaacttgatattttgggctctgatctttgttagcactacaatggcatgtatctcgtacagtcagaggtcatttctatagctccttcccccttcccatcatttctggggaatgtttgttttcaaaacaaagaattgggttaaagctgaggtatcatatatcagaacatatttcaagacaaaattaagaacactcaaaccttcctttgaaaggtcagatagtatttattattattataaaaatgatctgtgatttatgaatttaacttctcataaaccttctttgtaacagaatatgcagtcagaggcttaacattacattgttttcttttgacaacgtatccacgagaccactgcagctgttcctgtactcacaatagcagattaattaacacaatcatatgctgttggctcttactcaatgagtgggtctgcagcgggatagataggtaaatcctttaaatgcggtggagataaagcatatactatggtagtttcataactagccagttttgcttctgactagccagccctatcaggaccaggttcacagaccacagacgccctgagcttgaatttcaaagtcagccacacctatcgccaacgccataatgcccaacatttgcaagacacaaatatgtaaaagccgaagacctctcggaaatcagcagctttggttaaaatagcagtcagtctgccgccagcattttgagtctgcagtatttttttaaagttcaatcattgctttccttaaatatctctcttgcaatattactcactttttttttttttttttttttttttttgcccatccctcagtgcacatagttctgggcagctgtcatgactttagtttttttaagtactaaaatatttttttttcttctgtaactgtgctaatgaaaacgtgtgtaatgaaaccttcctcccctgcccagtcaccagccatatttattggcaactttagctgacattttagggaacgtcaaacctttgttagagaaaatgtaaggctttgctttagaaacaggcatgcccatgcagagaacgaggtaacaaggcagtaggcttaatagaatttccttcagactttttttctaatgtccattacatatgcaacactaatttactttttgttgttttacttagcacagaaattgaaaatgtgacaagctttgctggattaaaaggctcatttcatagacacatagaccaagagaaagaagaaaaacaaatccataatttggaaccgtttagggcatccaggtagtagaaattcagtcttccccatcactcggggcatttgtcgtgggcctgagatttctctggaactgtctctgtcctttagaagtagataaaagtttggccatgtttggtcacagaagtcttgagtgctttggggaaaaaaatcgtatcatgatgttgaggtctctcacgttccacttaggggctgttcctcagcaccaggtcctggataagaggttcctgcgggggccagaaaattctagctagtgagcatcagggagatacggtgtgtaaagcatctctgttatgggttgagctcaagttttctagggtgctcctcatacgtggagtgtttgcaactcttccgagaagcacagagagcaatggctgcacagatacaaggcagcagggtggctactaaaataacaacaatagttaaaatattaatagcaacctgacctttcttctcaaccctgcccctgtttgcccatccctctcattcagctattttactaaaataataataaaacttccttaaaaaaaggttcagaacatgtgaataattagttatatgtagaaacattgcttagaaaaacctgaatacttgattctgagatcagaacagaattgacttggaaatctgcacagacagacaaggcagacagagacaaggtagggggaccgtaggcccctgggatgagaagttatgactggttcgttacagctaaggtcagtgtcccgacaagtggacactttgcactacgggaacagctattgccagaagcactgggctccttgcaaagttgcaggcgtcttgcttcgacttcactccgccattccttttacaacttgcattttgaaggcacctggtaaggctgggatgaatctgctgtctgaagggtgcgacaatggacttaaccagacttccaatgtgcaggcagtggcgatgcttctgacccagctcacgtggactttgggctcagtttctagtactgggtcagctctatgggtgccccatcctgtcatccctccttccttccatctaacctatggctcaagaacaggacccaaggacattgctccaaattaatgtccggggcctttttgagggtatttcagaacttaagaccctgtaatctcagcactttgggaggctaaggtgggcagatcacttaaggtcaggagttcaagaacagcctggccaacatggtgaaaacccatctctactaaaaatacaaaaatcagccgggggtggtggcgtgcacctataatcccagctgcttgggaggctgaggcaggagaattgcctgaacctgggaggtggaggttgcattgagccaagatcataccactacactccagcctgggcaacagagtgagactccgtctcaaaaaagaaaaaaaaaaaaaaaaaagccccctcagctgttctctatgaagcacatcagattggtctttgtgaatatttccaagattacacattatggccaaaagcctaactgtgagttaggctaagagtcagcagacccaggtcttggcttcactattgctgtggtattgggacaccaagtaaaccttgtaaacactacctttcacatagtacattacttaactggccttacccatttgtgatgcctcctcatagaaagatgtgagaatgcagtgagatgttggctataaggtataggctgagctgcgtgagaccctgcaagtgaagactccagtgccagagcaaaggacaggctaaggtccaggaagaaaaggaagtcttgtgtgcttgtggtgtctctgagcttgcagcagtatctggtactaagtcagcagttaataaatatttgttgaataaatgaatgaacagacaagtgtaggatccttatgctgttctaggaaaggaaaatggggaaggagacctggaaggaggctaagtcagcctctgaacaagcagaggcatgctggtgtttcgaacagagagaaagttgtctacagaatcatagaatcatctgatggagagatagcaggcaaatacaacctcttatacacatggagcgtaggcccacagggcagaagggatttgtccaaggttgcacatccaagacagaacttgggaccagtttaccaactcagtctcagcccagctgttctttatgggggtatctgaagaaaatccttttagccccaagtgtgcagtcaggctgggattcagtgtcaggcagtggttggggtcatggcaaagcaggaagggtgtgactcagagaagaaagacacaacgcagggaaagtcacagcaagagactccagtagaggccggggagggagtccagactttgtagcggatggtttcagtaatgggcagtggatcttatctttgtcagggtagtcaaaagcatcaggattcagttgcaatgataattttgtttcttgcttgtactgcaacagcctccataatgatgccagggtgtattcagtgcctggcacatagtaggtactttacagatatttgttggatgaatgtcttgaaggaatgtccactctccgggcgttcctggggaatctggtctccaggtgtaaggagggcttgagacttgggttgccttttccactgctcctggctctctgtccccataccctgtaccatgcaatgatcctgggccatcctggaagtagctcagtccctacaaactttctgttctgtctctggaataccctctgagttctcgacttgtcaaacttccacccatctcttaacactcagccggattgccagctcttccaggaagctttccttattgaatcagtctccacaagcagacattgtcacttctggggatgccatggtcctttgaaatgttgttttaaggctcttagtgtctcctgcctggggacaaaggagggcatatctaatgatccttctacttgtttgtcctgtcccatgccagagcactgagcagtgagctgagatttaatgagtatcagcagagggaactgcacaaagtaggtctgcagtgaaagtctgttaactgaaggaacaaatgtcttattgcattgctgtcggaattacatatggggaaaggcagcagaggcagttgggggaaggaaatgacattccggaggtaaagcagtagtagagatgggggggtttgggcagcacctgggccttctcaatgcactggatgctcaaggtctccagggatacaggtgagagtgatggtccggggttggcctcgagtagatgctttttatggtgagctagtcgagtaggtgctttttttaatgataagctaggtccacacagctacgaggggcgaggggcactgtgccactattctgtgtaacgtggtgctggcatggcatccttctgtaatagggcacaggtgacagtgtcctgcccccatgcacagcctcagctccagagaaaggggctgggagccctctgggggagcttggctcagcagtgtgatgctctttacaagagagatgattatgggccaaacagcaaggtgctcctccccctctactttgctctccttaaatgccagaggagcgtctgcaggtgctgacacacataccgagagacactggcggccacaatgcccatcggctgtgggtgtgcccctgggtgtgtgtatttaagggccccgtgagcggcttgagtcatcaatgatgctcttgaatggcaaattggtcagagttccacaatggtaatgatcactctgccggtgacctttctagtgcatttacattttatcacaacatgcacaagccacctataggcttcccattggctgggtcattcctcatgcacaataacccagcatgcagggacgcatccagtgtagatgagaaaggggtagcttctgacacatctcactctattgttgcatggtaatctttagcaccaaaggagacctttgagttaagcccatgttttcttcccttttatttttattttaaaaagtgaaggcactccaatgtgacatgcatccctcatgttaacagagccataaagatgaagcattggactcattgctgctcccacacatgtatggaactaaacccacctgagtggcccaaaaggagaaagcaagggggtgccccagggaagtccccggatcctgaattcttcggaactgttgtactttaagatattactttccaaaaagagatcaccttcatgtgtgtgtgaaagactgtgtgagtgtgtttgggtgtgggaacatgagtgtgtgaacgtggggtgtgtgtgtgtgtacattctcacgcttgtcatgcagaaattcagcctgtaagacccaagcaggaccagattccagagacaccctcagaagcctcacttcctgaagtttcagccctgtccccatcagccatatgtaatcaattagccatgtacctccatttgctcatttactcatgaattttgcatcactggagaaatcgcagtcctcttcagcttatagaaaattattaagacagtgtggtgattcctcaaagatctagaaccagaaataccatttgacccagcaatccctttactgggtatatacccaaaggaatataaatcattctatcataaagatacatgtatgtgtatgttcattgcattactattcacaatagcaaagacatggaatcaacacaaatgaccgttaatgatagactgtataaagaaaatgtggcacatatacagcatggaatactatgcagccataaaaaggaaggagattatgttctttgcagggacatggatggagctggaagccattatcctcagcaaactaatgcaggaacagaaaaccaaacaccgcatgttctcacttataagtgggagctgaacagtgagaacacatggacacagggaggggaacaacacacactggggcctgtcagggagtggggtggggggacggagagcattaggaaaaatagctaatgaatactgggcttaatacctaggtgatgggttaacaggtgcagcaaaccaccatggcacatgtttgcctatgtaacaaacctgcacatcctgcacatgtacccccagaattaaaaattaaaaataaaaaaaagtttcaaataaaagtcatagaaacgtcaaaaaatagaaaaaatataactgctgaagacagagaggaatgcattaaataagaggcggagtggctgtcacatccagggctctgggactctcacttggtccttgttgtctgggtgaggtgactgcgtggggacccatttcacagtgggggacaggagctcagggcttttgggtcagtcactcctaggtctgaggctgcagtcctccgggcactctaccgggggcgcaagtaggcagcgagcatgcagcgaggagccgaggagccgttccagcccgtgcgatcctgttcagctgaatcgtcactgctgtttccatttgagcctttaggtgacagtgccaagaataaaaataagcccggctattttcactcttatttggtacttctttttcttctttttttttttttcaaatgccattgaaatagaattctaatttttacttaaaatatgtcatcttaataaattgctacattattgcaagttgcttgatatatttaaagaccacctctttttccagaagagctcatttccaataatataatcacaatcaatagaaaaacattatgtttctatatacagtatctgctcttttttgagggcctatctgttcagataaaagaagtatttatctatttatgtatgtatctatctttgcatctatgtatctatgtgtgtaagtatgaatgtacatatgtatctatgtatgtatctatgtatctgtgtttgtatgaatgtatgtatatgtctatgtatgtatgtatgtatctatctgtgtttgtgtgaacgtatgtcggtatgtatcttctgtgtttgtatctatgtatctgtgtatgtaggtatctatatgtatatctacctatgtatctgtctatgtatccatatagctatctatatttatatgtatatgtgtgtggactcctaggatgtcataattttaaaataatatgactttatattttatcttcaaacatccaaattgtagactttgcatcaaacgtatttacacatgaagtgtcttaatacgtttcaaaataagtttcgtgtgattaccttcttttcctacagcagttgtctggacttctccagacatctgtcctctgttgttagcactccttaacctcaaggccaggaggagaaaggtcttggtgactcatattcctcttagccttggttaactcttatccagcaagggcttggtggaagtccatgttctggtggctgcatgggtcaggggcaagggagggatggtggcagatgaggacgaaatgaagtgttcctccccttggagatgtgtgcaagtctaagtgtgtggccccaccccactcccccacctaccagggacttttaggatccaaagccaagatagcattccctccagaagtactcccaagctcacctttatgccagctctttttaccaaagagggtaattttttctaaataatttcttagattattttaaatcgttcttctgggaacaggtgttttcttgggatgggcttgagttccaactgacatagaaggttcaggagaagctgcttctaatcccagggtaccccagattctagaatttcaccaagatgcagtggatggacttgggtctcacaatcccagtctcactcctggttctagaatctcagcaggatgccatgggatgaatgtgggtctcacaaccctgggctcactcctgtgtctagaatctcagcaagatgcaatggatggatttgagttgcataacttcaggctcactcctggttctagaatctcagcaggatgcagtgggatgggtgtgggtctcacaaccccgggctcattcctgggtctagaatctcagcaagatgcagtggatggacttgagttgcataaccccaggctcactcctggttctagactctcagcagcatgctgtgggatgaatgtgggtctcacacaaccccaggcttgctcctggttctagactctcagcagcatgctgtgggatgaatgtgggtctcacacaaccccaggcttgctcctggttctagaatctcagcaggaggctgtgggatgaatgtgggtctcacaaccccaggcttgctcctggttctagaatctcagcaggatgatgtgggatggacatgagtcttgcaagccaaggcttctcttggtctttaaatctcagtgaaatacagtgggattggtgtcagaggcaagggccacgagttcttatcccagcagtgctacctcctggctttctcattcagacccatgctttcttcgtcagtacaataggagtgtaccaagctctcttccaggctccctgtcagctcagagctttgttgaggctccttctggtgctgtttgggcattgttcaggattggagcgagaaggtttgacctgtcatgtagagtttcagctttcttaccctgggtacagagtctcaaacctacaaagtgggtatcaggggctgattactttatgaaaaggctcccatctacccccacaccctactaatgggattaaccattgaatactaaataagaaggaccaccactgcccatatttactaaaagctcaatatcatcatgctaagttctgttcttgtcttgtctcatgccctccatgagaacatccctcagtttcaagcatgacttctcattcctggttcatggaaaaggaagccaaggtttggagaagttaaaacttcaggtcacttgcttgcagtggtggatactggattcaacccagcattgtctgacatcatagctcatgctctgaaccactacacaagctgtacagaatggaaaatgttggctgttaagtccctatgtgttgggaacctggtttcctagcttttctggcatggtgggttgcatttcacttgtttttatgctggtctcccagcataaatttgacctcctttcatgggcctagaccctgtttccttcattggctgagcagtcaggagctcatctggtgaaagtaaagtgttcgcagatcttgcttcataaagaccagtccatactgagactcacacacctctgaaatgttcacgtaggtcagtggggaaatagaatttggattgcaataattatttatcttgcacagagctcatgaggaccacacaatggcagggcatgaggcacatcctatttgatctcaggtccttaacccattcatgcctgaggttgcaattttttgaatttttgcaatcagaccttggcgatgaccttgagcagtaggatacaaataactcccacatgcttagcattccaataatggaacactaggcataaatgggctaagggaggtagctcaagtgctgggatccccagggatatagctccaggggagacactttgggatactgagtattctggcagggaaacaaggtgagggaaagcaaattctaaaagggttgaatttactcagtaagtaatgtagactatgatatttcagcccatggacgaagttgacatacccatatctttgcctgaacgacccatctggtcaaatgccagggaaggaacatcagtcctaggtgttatgtctactccagggagaacagagcctctttacatgggcacttacagattaaatgggaatggaactgcatgttgaattgcctgtcttgagtctattagacctagcttttctggactacattgtaacatgcatctgcaaactctggaacaagggtagggctggctggcagtgtgggtgggaatggttttttttagctagctagcaccaggggcagtggagtagatatttttaaacttggggtgggattgaggtgaccaggggaagaggccctggaaatggtgagtgatcggaaagatcgaactgtgtatgtccaggacaagtccactgaggggagagagagggcagctgtggctggagactctggggagcagccagggggctaatgggagggcgttaccctaagtaggggacttatcatcgtctcatcaacctggacatttaagcaaagtagccatcagggacccacatcttctcaagatattttattttcttaagaaaaaggacaaaagtcctgagatgcctctattgcccctccagcaaactaaaagagcataagctgtccgcagagttctgtgttgaagggtgtcacacagcaagggagtaggggacaccagtgagatgtccctgagccacgggaaagagcttggggacactgctgccccctgtcccatttaaagttggatttctacctcactcttgaggccaaaataaaccccagatgtggcaaggagttaaatgcaaaacacaaaataaacagaaacacagggagacctaaaagaaaatagaagtatttttataattatggggaagggataccctctccaaccataacatctgagccagaaattctaagagtaaaggttgacaggttttacctttattcattttacttcttcatttaacacagtactggcaaattatgctactcaataaatatttgttgaatgaatttgactgcataaaaattaaatatttctaagcagcatgtgtgtatgcacacacacacacacacacacacactcccaaacctaaccataacatgcaaaatacagtatgacaacaaatgtttgctaaatacatgatagatgaagggttaatattcctggtgcaaagaaaaacaaagcctttacaaatcaataagaaaaagacaaatcctccaatagaaaaatggtcaaaggacatgagcaggcgattcagagaagaagaaatacaaatggtcaataatcaaagaacagtaatggaaatctttgcagccattaaatgtgtgagactgacctgtatttactgacttggaaaaatgcccatgacatattgttgaatgaaagaagtgggctacaaaacagcaggtagagtatgatttcatttacggaaaattatgtgagagtatcttagtctacatcttttgtgcaaaaatagaaacattctcaaagttgcttaagcaaaaaagagaatttgaggaagataagagtgcctcatcatccccttgcaaagtcagcagacatgtggcatcacccttgggtgggctggggtcaagccctcgtgggagtccctgggcagccaggcagccatttctccatcccctatctccctggcgccagagcatctcaaaactctttgcctccctctatttttctgattcctttttcccctctttgcaggccacctgggtagtgggattttgggtaatttttattcatttagaaatatatttctgtatggtttggggtttgtctttctttctttctttcttctctctctttttttttaatgaacgcgttatttttaaatttggaaaaagtctatatttttatttttaaagataaaagaaactccagttgggaagtgtaactgataaggagttaatatccttagcatagagaattttaacaaatcaataaagaaaataataccacaagcaaaaggaaaaatatggccacttaggagctcttatttagtgagtgtttactaagtgtggagaactacaaaactttgtacacacattctctcttcaacagctttaagaggtagatactattcttccctcccttccttcccttcttctttcccttccttccttccttcttgcctgcctgcctttcctccctccctccctctatccctccctccctccttccttccttcctccctcccaccagcctccttccctattttccttccttccttcctacttccttctcccattccctctctcctttcctctcctccttcctctctccctccttctctcctccctctttccttccttccttccttccttcctcccttcctttctcccttcctccctcccatcctctctcccttcctccctcccaccttccctcccttcctccctcctcctgcccccctctgacccactcatcctcccacccttcctccttccctctctcccacccttcctccttccctctctccaactcttcctctctcccacccttcctccctcccaccctctctctggccctctcactctcctgccctgtctcccttctttccattcttcctcccatgagtacccacccactgagcatctgcttcttgtcaggtatgttctgggctcctcggattcaggctgctgccctcatggggtttgcatgcctactctccccattttacagcaaggaagcctgagacctaaagaagctgtgacctggggcgccatttccgatgaggatgttatatgatccgcaaaataagaacacacagtttccagagaaagaaaaacaaatggcccatatgcagatgaaaatattttaacctgactagtaatcaaagaaaaaattcaaaagttgttttggtttactgatagattgatttgctcctccaacccaacaacttatgagattgataacaatgagtattgtatataaggttgggagaaaccagacactcttagtccgcccagtagctgtttatatttatacaaagttgaagagtaatttgggaaacatgtcaaaagccccccaaataagtgtctgcccattgtttcagcaattccctttttatgaaattattctctctatatattatattattatgagatatgttaatatttaatatatttattaatatataatacattacatattatatactaataaatattctataaatatatgttataaattttaatgaatattattataatatatattttatgataataaatatatattataatgatatatgaatgtatactatatatatggtataagatatattaagatatgaaatatcttatatagttatattatctcataccttatataataagatgtatcatcaataatctatattattaatctatatataatatatctaatgtatattagatagccaaagatgtttgaccaaggatattcactgagactcagtttataaagaaaacatttggaaacaatttaaatgtacttcagaaaagaatctgttgaggaaactatgactcctttactgtggaagtctgtagtttttgaaaacgatagcataagtctgtatgtttttgacatagagtcttactttgtcactcatgctggagtgcagtggcatgatctcggctcactgcaacctctgcctccctggttcaagtgattctcctgcctcagcctcccgactagctgggattacagacatgcgccaacgcacccggctaatttttgtatttttagtagagatggggttttgccacgttggtcaggctggtctcaaacccttgacctgaggtgatctgccctcctcaacctcccaaagtgctgggagtacaggtgtgagccaccatgctcagccaagattcccaatttttaatctcttcatctgttgattttttttagaaaattttctttaattttgttactttatctttataaataatataaatattatttatataatgaaatacaaatattcctatttacagcagcaggtagagtatgatttcatttatggaaaatgaatatggaattatggaatataaatattcctatttatatttcatgatgtattttccttgtttgtttcataagcagacaggaaacctggcataaaagctctggagggcattgcccttcccctcctgatgagattgggtggttgatgacttttctctatgtccctaaagttgcccctctagtttctttcagaggatgttcatctcctttgacaatgattcttgaagaaacaaacaaacaacaaaatctaagctagttgactaggagaagccacaggcaagaagtccttcttggtgtggtagtaacaagcccatctccactcagctgcgctgtttgaatgatgctgttccccagtttcatatttcttttaggtcccttaacagagacttctagggccccctttgtgctgaggcgaggggaggttctgccctggggaaagacctgcctgggaatgcccccacactgtggacattggcagatcttgcacaaagcgggcaggttgtgggggtgtggggtgcatgtgcgctggacccataaaccatcctgcagaggagaaacctttctttccaaggacggtctgccgagctgattgggcctcgagtaatccacaactaggttttattttgatccctttccccacaacaaaaatagcttccttgtttgggcttggtttaacctgattataaaactaatgtgtgatcattgcagaagggtataagccaaagatccatgtaaggaaggaaaatatcagtcttaactcttttgccctgagataatcattcttaacattttgctttatatcccttcaggcttttctatgaaaaaactacttatctaaatatcttttcattttcacaaaaagggggatcgtagtatacaaattggtcttgtgatctgcttttgccacttaataccctgttagtgaatattttgcatgtcaaaaatacagacctggctgggcgtggtggctcacgcctataatcccagcacttcaggaggtggaggcgggtggatcacctgatgtcaggagtttgagaccagcctggccaatatggcaaaaccccgtctctactaaaaatacaaaaattctctggttgtggtgatgcatgcctgtaatcccagttacttgggaggctgaggcctgaacccggatggcagaggttgcagtgagccgagatcccaccactgcactccagcctgggtgacagagcgagactccatctcaaaaaaaaaccaaaaaacaaaaaacaaaaaactgggaaacttgagctagaagtttatgtagagaaagttgagaaaaataagattaaaaagaatgcactttaaaataaactgttagggatagtaagacaatgaaatacaataaacctttttaaaagcaaacaaaaaagcaacttaaaatagggagagacagaaacttagagtttgaaaaagattaaaacttgacagtgttctagttttaaggtgtaaagaatagagaaaaagggttccaaaaacatatctaaaaggtatttaaaaagggaaatgaaacattataaaagaaggttaagagattactagaagataaggcaagtcaaaggagaaacaatcaagacaccttaagttggaggaagctaaaattataccaaatataagtatctaaagccaaaatattatgactattttaacccagtaggcacaaataagagacaatcaggcaggttgttcaagtgtttcatgcgcatacgtgatgaacccagaattgcccatgcttttttctttctcaggtattatcacatttagttatctgagtaattatttgattaatggctttcttccccacgagacttcaagatctgtgagggcaggatccttgcctgtttaacttaggagtgatgaatggtaaatatatgttcattaaatggaagaatgagtgaggcctctcccagaactcgttttccatggaacagggcctgtggcactgtgccccagcagtctggaaagggaattgctcagcaaaggggatggggctgtcggctccccctgcctcaccaaccactagagccttttaccattcaccgattgcccatggaagctgaattatgaccccaggcttgcaggggcttatgggaaaaagggctatgagaggtagaaagccaccatctaggcatggggacacccttgggctgccattgcagacccctgcctgagtggctttggaagacattctggaagggaaacaagggctatggctgtagaggatggggaggacctttcttctggtcactctccttcattcttcagtcccactgcctggggtatgactgggaccaggtcagaaaaggaccccattctgctgaaaaggaaactgagctgccacatggtgaatgacagatgtgaggcaggtttgatttaatgatccgggccatgagactgtgagtctttgcggcccacagagaaggctggaaggcagcagaggggggccaggtggagcagggagccctggtttaatttctaagaggcctacaacagagcacctaggtgccctagaaaatgcgttcactgacagcagtgagggtaccttcaaaattcaagtcctatctgccctacctcaccacaccaaccaggaaattaaacaaccatggtgcccttccttagtgactacatttgtgggtgtgggcaccgtggttcttttctcttttctttctttctttctttttttttttttttttttttttttgcgtcagggtcttgctctgtcacccaggctggagtacagtggcatgatcatggctcactgcagccttgacctcctgggctcaagcaatcctcccaccttaacctcccaagtatctgggagcacagttgtgtgccaggcaacacaggtgactaatttttaaaaaatttcttgttgagatggggtctcattgtgttgcccatgctggtctggggctcccgggcttgagtgatcatcctgccttgacttcccaaaatgctgggattacaggcatgagccaccatgcctggcctcaactgtgattttaaatggtgggattgagattttttccaaaagtaactgaaccaagaaggccagagggacaaaacttgcaaatcgagttatataatgtatacaatatgtataatatatataatatgtaatgtatatattatgtataatatacaatatgtaacatatattatacatacatatataactacgtatgtataagatatgattataattacatatgtattacacatacatatatgatatatattatatcttatacatacataattatatgtataacatattataatatataatgtatgcatagtatataatttatatataatatctgtataatttatgtataatatatagctatataatatatattatttgtgcataatttatatatagtaacatatatttatatataattttactgtgtatatttaaggcacacaacatgacattatgggacatatatagatagtaaaaaggttactgtagtgaagcaaattattatatccatcatctcaaatagttatcctttttttgtggcaagagcagctaaaatctaaaatctaaaattcatttagcatgaatcccacaatcagtacacttttcttacctacagttctcatgttgcacatttgacttctagacttgttcaccctacatatctgatccgaagtacaatggctattaactacttcatcaggggaagaagcagaagttggtggaaactgttgaatcgtgaatttctttcttcgttttatagctggtgaaattccatgttcctgtggtgggtagtgcatggcaggagccgagatcttgttttatcaagatgagtgggcctcacaaacaaatgatttcattctgttgaaaggcattatcactgcatctgacatgaaaatattgtggggggaaattagaagtggaagtttataaaatggaagtgtccgggggcagcctgcattcatatcaccgaaacttcagcatagctttttttttaaagatagaaattttgcccacatatacactaataaaaataaatctgtttccgattactaactatgcagccaggtgcttgtttgttatgagaaaggcatgttcattaattttcagctatgaaaagtgcactgtgccataaatatacaattcaaaatgtactgctgataaatgaatacgcagattgttaatgtgccagagaggggtattaggcatccagcacaaggcagacaggtacccaggtgatggggctggcactttcagacctggcgttccagcaaccacctagccagcctctgacagtctgtgctcctgtctttgggaggagtttgcacagcccctctttgggaggcttcaacttgccctgttttctctttattgtggcagattgggcagtgatagctttagggaggaaggcaggtggcaatgagttgcccgcagaggcattctacagagacgcggggatcgctgcttccctccttcatgatgggtcagtgctcctcgatgtagagtgttggccattgacctctcctctatggttgcaaggaagcagacatcagagcttcctggaaagctagaagtaggtggctctcagcccagatgcatcctcacctctctccaaggagaaggatatgttcccactgtagttatcctcatcgccttggactgggagacatgtcctgccttccctctttgaatgccgtcacatcagaagagtgacatcttcttgtccccgacctgagatgctgatcagcattgtagctttgcatccttggcaggacctgtgtctgctgccatgagtctgttgcccgggtcaggcgtagagtggggatggatatcatatctcccatttggcctcctcagaggctgagccctggctggagaacaaaggaaataacactctgaagtgtgggtggagtacaaggatgaccatcaccacttgagatcgtttcaagcatcttcagttttcagagcctgaatggaggggagccgtgggtaagatgggctgctcctggcagagcatccggaaggtgatgtggcttggcgaggctttttccttccttcccccaccagacaccttgcccagctctcagctcctgctcaagaactcttttctctggttcatctctcgcagcttggggctcctgactccttcccttgtctgatagaatgtcacagacccccaatatattttgtttacattaaaagctaatgcagctatgacgtgaaattttaatttatacacaaaccataaaaaagccttcaggttcatgaattcctgatgaggcagagactaacagtatattttgatatgtttacagtttatgttttccactaagaatatctagtttgtgggtctgtctggggtgctagtaaaagaggggaaggaatggaacgaattcaagcagttgtctcagccttcattgtgtctgcggccatggcagggtttgaaagcattttcgggtatgagctgaaatttgttgtactgcttggtggtaaacagacacgtaactcacccccacagcagacattaaagtgttacaaattaacatacacatgtaaaattttaaatataattaatttagcagataggaccttgcagttgtcacattattatttaagtcggatgcttggggtggctcagagcttacatgggtggggtaaaatgcaaggagaccgtatgcacgttaatgacaagttaacttgtgtctagttgagacaatcacgaagaattaaacaaagcttttagagggtttctggtgctatttatccttcccctccctaattttcataacatagatttataaaggaaattagaaatgaggcagagtccataaagggtccttggaggataatccatacatttacattaagtataattcgatgtatcatctacgtgcaaacttttgtctgcaaagcatatggcaaagcttttatggatatacagacttttattttaaacttaaaatgatgaaaagtttctgagcttcaggatcctcttactggtgactggagaaattgttgatcacatttttaaaattcagagaattagaaccataaaatatactgcaaaacacagaatttaaaatggttgtttttccaatgcctgcaaaattgttttattaggggactgcggaacacctgccttaaaatgtcgttcagaacatctcccgaatgtcgttttccttaattgacttggaaatggcccaaatgtattgctgaatgcagtctaattaatattaataataaatgccattattaacatcaaagaacatctggtgctcctgtttactctgaagccttatatgtaacacattttgtggctgtttcatcttgcaaacattgtgcagtaaacagtttttgccatgcaggtcaaaacagacccctgtccaagcataatgcattatatttaaaaaaaatcaaatattttctttgggtcacattcgttgctgtgatacgagtgtgggttagaggtcccttgagtaaaccattttgaaaaaaaaaaaaagtgctgctcccagcatctgtacattggctacattagagttttgtacaataaatcaaccactgaataactttaatctaaaatttcattaagtagttcttgtcaggtagtaaagctggataatgcagtgctgtttaatgataattggtgtttggttaataaattctgcaagttcgaattactttctagcaatctatagaatgcaagcctcagcagtgtaactaaacctcaaattgattaacttgcatgaaccaggcgttcacaaagatggcactattccaaataaaaaagagaacagcgcatcagccggatggtgttatgttgctctggagtaaggaaataaatcccctctgggtgcatttttaaaagcttatgcctttgaaatgatgtcatcatattttatttttttttcttttctttcatattttctttatatgtacacacacttaggtcaccagttcacaagacacgtgacacattagaataatggaaagcattttttttatatcatagaatcaaaaccacaaaacaatttagctggaaagtattattgaaagggcgccattaccagcaagctgctgctctctagcaattaatggaagcagggtgtggctagatgagggtttgctgtttccttcctacatcttgtgtgcgcaagaaaataaaatataagagccatttgcaagtgaaatcagcgcctaggttcttggagttgcgcttaggagtcctacatcccaggtgcaacgaccctgcaggacagcaggcacctttttctggtgggatttgtatttgggatggacatattggattaagtgcatgaattatgttgatcttctctgtgcccccaaccccggtgactcctgtgacattggtgtcattcaatcagcagtctgtaatagttccaagttaaaaataacatttattaaatgtcttgtaacacaagaatctggtctatgatgaagagaggaaaacaaggcatctaatatcagaagaaatgaaccaggctacaacagggacagacagggaggtgtgtctaccaggtcctccactctagactagagttgaagggtggatggaggatttaccccaaatgtgggactccagaaacacagctcccggtggtcacaaccaacttgttttggaggtggagcaaggtcctggtgggaagattggtggaagaccaggtgcttgggatgtgtgaatgctagaacattctccaccaagctgtttctttctcccctgcagatggggggattttgaaggattctgagaccctcaaactcagggctgagcagtttatcagcatctgtgtgcactgactggtgaggggcacgttgggtgctgtgtgggacacacgagagcccattggctttctgtgtgggggagcaatgcaccagctcagtgagacctggcgagccaggtcctgtttctacctgcctcagagtggtccttgacccgtggcaggctttgctttgcttttgaagctgagcagattgtgccaaatggcgtatgttttcaaagtgattcccctaaggagaggagcacagacctcagacacaccccttctactagcctccatagattattcaattgaagcagtttgtccacatccaactgggtggttagggagaggttattcaatttactcccaccctcaaaaaaatcaaaaagtctgttttcaccctgagcctccccttaatctcgttgatgtggcaggggtggcatgctgggtttcgcatgctctctttctgattggttttctggtaattattttacaatggtggtgtctggaagccagaacccctgggtcctgcaggggggtcaaagagactcacagggagatgagaaatggtgtgactgtgttggagcaaagaaagatgaccaagtagaagagtgaccagtagacgggaagacccagtgtcccaacctgcaggaggaccttacctctcttttccaggactttatgcagctcttctggtggcttttcttggggcatcaagaccagcttcttctgcttgattccagagggcaccacccctaccccaccatacctgcccctccaggctgtgcttccatgctgcatgcacaaagcacctgtcttggcctccacatccagaaactcttctcatcccttcatctccatattgtacttgcaacgtgaggacccctcattgttgactccggctctgggtagcttgcagagctcagtatcaggaatccagtgaccttgactccagtctgctctgtccttactagctgtgtgagcctggatttgtaattcaacctctgtaagcctcagttttctcatctgtacattggagataataaaactctgtggcccagcgtggtggctcacacctgtaatcccagcactttgggaggccgagatgggaggatcatttgatgagcccaggcgtttgagaccagcacgggcaacatggcaagaccccatctctacaaaaaacaccagaaaaaactaaaaattagttgggtgtggtgactcacacctgtagtccctgctacttgggagcctgagatgggaggatcacttgagcccaggagttcaaggttagagtgagttatgatcgtaccactgcactccagcctgggcaccagagtgagaccctgtctcaaaaaataacccaaaatataacaacaacttctgccccaaagggctgttgtgaggatggatttagacaatgctttgaaagcacatagaatgtgctcgattaatgttaactgctattgaagtagttatcgtttatgataagagttcagattttattattattatcaccattacttttagtatatttattttgctctccctggtgcatgtgaagcgccttcaggataaaaacctgaatcatcctcatgggaagtgtcccgtgctgttaggacagagtaggatctcagacagcgctctatgatcacagcagcaggaaggcacctcaggaagccattggtaaaacacaggggctttctcggtcttataccttagccagaaatccacagtggacaatatagaagcagatacaaaattgttcctggccttcctcttcttaatggaatctcccagaagtaaaataagaatgcccattgctctaggccaggcgtggtggctcacccctataatctataatcccagaactttgggaggccaaggtgcacagatcacccgaggtcaggagttcgagaccagcctggccaacatggtgaaaccctatctctactaaaaaatgcaaaaattagcagggcgtggtgggaggtgcctgtattcccagctactcgtggggctgaggcaggagaatcgtttgaacccaggaggcggaggttgtagtgagccgagttcatgccactgcactccagcctgggtgacagagtgagactccatctcaaaaaaaaaaaaaaaagaaaaaaaagcaataaagaaagaaaagaaaaaagaatgcccagtgctcagttgagaatcctacataggcccagagatttatccacagagagacaagggcagaagggaaaattgggtggacatgtttgctgtggtctaattgctctaagatgaatgaggaccatagagagaactaggtacctcaccacaagatgcaaacatcagccaggaaggacccaggtgcctcctttgccgtcctccgtcctcctgggcagcttctccctgcacggaccagccggcctggtgtgtgtctccacggcactgaacctgtgcagggcaggctctccatgaatatttgctggctgaatgaatgaactcaggggcaacaggaaaaggacaacgttcaagccaacactagggacataaacttaagtgagacaatgaggccagaaagtctaaagtgttttctgtcacttggtcagatctttctttctccttgaagaagccctatgaagaaagccctggaggagatgataatggcgcctttcaccacggaaaggtcaacccacatgtgttcattgagtgactctgtgggccagcccttcgctcggctctgttgatgattacgagacaggcaaacccacggggtactcttggtaagtaggctggaatcaaaacacatgagaaaaattagtgagcattccaaagcagcatgtcattgtatagaaatgttcagaaaaggtttagagacggagtgtgccgggaggccaggcgaggcttcgtggcggcagtggaagtgcgaggcttcgtggcgaggcttcgtgaagtggtgatgagaaacgcttgaaaggcagggaggagaaggtcgggccttctaaacttggagaagataggggaaggccaggtgtggtgacagatcccaaggccagtgcagcagtgaagaaatgtgtcactgtccccttggctcaggcccagccaccgagtcctgggacgtgatctttacatcgcctggttctctggttgatccatctttccctctgatcactgcccttcctcctggggcctttttgaaatctgactcaggttctgagcacacgtttcagcatttctggatgcaatttggtatcatagcgaagaatcaaagggtatttgctatcacttgaaagtctgtttctctccctcttcctctgagtacctgaccccacaatcatcactggctttgaaataacagacccatcataattacgagaattagtctggaggcttctgccttatttgcctaactgagattattaaggccgtttttagaggtggaaagggctcccaggatcatctcggctgagatggcaaattcagagagatgcctgcagggtgggggccagccaggtagtgagggtggggaaggggcccggtggggaggacgcatccactgcccagcccatcaacccttgctctttgggcccatgggctcagcattgggagataacacagtttctcaggagaagctggaaatgctgaccatgtgtgagtgaaatgtcccaaatttgtatatgttaaaaacaaacttatagcctgcgtgacatagtgaaatcctgtctctacaaaaaatttacaaaattagctgggtgtggcggtgcatacgccccagctacttgggaggctgacacgggaggattgttggagcccaggaggtcgaggctgcagtgagccatgatcacaccactgcattccagcctgggcaacagagcaagatcctgtctcaaaaaaataataaatacatacatacatacaaacaaaaaaacaaatttaacacatgaaaaccctgtgtgattaaacctttgcatctcaattagagtcctctgcccccattccatgatttgggggtgcaaacagaagccccgaaataggaaaggacttgggcgaggtcattaacgtggtgggcacagcgtgtacctaccccctcctttgccaggtccgcagagttatctacagaggtcagtctagcaccctcccattagcctgctgcttgaactgtctccttctttccagaaacttctgcatgccagtgaccagatcagcctctctgtggctttgaacccagggtgcagaagcctgatccagtcaatgctccaagcacggtccagccatcacctcgcagctggccctgtcacctcctgttgcaggcgaaggggcagcagcaacctggcagccctgggcagctggcaggaagggccaagcacttacgaagggtagcttcagtgttcttacagggtattaaaggaatacagcgagagttaatgcaaaactccttctttgacttaatttattataatatatgtggctaaaatgtagatcacactgctgtgttggatctccgttttgattcccaaaattgcaatcatgatagtggattataaccgtgctctaacacatagatgaggaaatgtattcctgtgcaattttccccgaaggagaagtcagaggataaggggcaggagttttgaataaccttgcaacatttagttgtctctctcaattataggatagaaattagcatcccaggatgatgtgcgtgtgtacgcagcaccgctttgaatattagtgcagaaggacatctgagggaatggagaaaatgattttccatatgaaagaaaaagtcactggtatcgaatcgagcaatgtgatgttgccttttattcagtaagtgcctactatgtgctgggcacctagctaaaggttgggggtgccaccgtaaaccagacagaccacaggtttgccatggaagtgagccttagcagtcagtgttgggtgatgcccaaaaaggagtgaaccagggcagagggatgggggtgcagggatgggggagctatgggagagcctggattgcaggctgagggaaagaaacatcccgggagcagcacgcagatgggaaagccaagtttgcttccttgttctggtggtgcgtgcagagcatccgtgtggcgggatgcccccaagaacatacatctgggcggactttctcctcaggcccagagactcagcagaagtacccaggcagaacgaacggcctgaggtgctgccccagggcctggactctgcagtctccaccagcaacggttcaaggccaacacctgcgcagcctatcgcgtcccaaggttctgttggcccaaatcaagccacctgcctcccccagcccagctctggggtggggctcccaagagccaccagccttgctgcaaaataggattgaatttctgtgtggatgtcgagccctggctggggcaggtgtggacagggaagggccctgtggcaggagggactggaagctttgcacagcaccttggggcaggtgaggctgggaagaccaagctgacttctccttgccctccacggggttgtgctctggcagtgggagccctgcactctctcaaggagagcctggaggagctgcagtctgcagctgcaagaggagggggctggactgatggaccacaagggaatggagccctgggataccagacaccagattccccacgtccagctttccttcctggagagagcctgtggcagcctgtccactcacagacacaggccacctggacccactgccaggccccacaccctggaagggcaggtcagaggtggctagttatgtacttaaaaggaaaaggcagacttcttagattgcatgatcatggaagggtggccagccctccccaacaccattcattcattcattcattcattcggctggtcaccagtatttattgaacacactgtgccaggaggctctaagggacacaagagtgagaaaaacagaccccatcccagccttcaaagaggtggcagtttggtggcagagacagatattaatcacacatatacgctcagtgcaaactctgagaaatgtcctgaaggttaaattctgggatgattgggcagacctgacttagtctggaagatgagagcaaatgacattggagctgaaccctcaaacatgagtgggattaaccaggcaagatgcaggtggtgggcctggggctggtgtttggggtttgcatttcaggaagagggaacagtatgtgttgagattctgaggtccaacagagagagaaatttctggcccggtgggccagtagggccagctctgggatttttaaggcatttcaggatgagaggaaacatttcttagatctcattgcagtcccaagttcctgaagctcttaaattctttttcaatatcagggcatgtgttctcggggtaggggatgagccagccagggggcttcccgggtgcaagcccccagcgtgtaggactgaagggccctgggacctgtgtagttgtggatgaatggggagctctttggagatgttgagagaccaatgggatgctgaggcctgagcttctacctgctgtctgcttctttctccctgtcatcccagtgcccacatccccccaggtcctcatacccccaactccttcacctactcccctcaaaggggtgtttggaggataataccaagtaagctctaatttctgggttagacaatgtgggagagagtgaagatgtgttatgtctacatggagttcctactcagggctcggtggtgcttggcattaggaaaccttgttgatcatgcagggggaggggctgaccattttggaggatcctatggtgactccatgacatggatcaccacctgctggtttgctgttttatgctggtttacctttttcatactttagaccttgtagatggtggggttgggaggctaccaattgggactctgctggatgaccttttgtccacagtaggaggccttattcccatgtcataggcagtgtttggaggctgggcgaaggtaggaggcatttacaaacacacagctcggaagtggcctcaccagacggagcccagagccggccattgcctggtcagtggcttccccactctgccacgcagggtttaaagtgcatgcagctttgcaagcccattgcctcatgaagcactcagaccctctgtgactggcaccattctccagtgatccaactttaccaacaaggaaatgaaggctcatgaagctttggcgctttgctcaggaccacagagccagtgctagcagagtttagattcagacttggctcccggagtcccttggtgttttgaggtgctcgaatgcccaggcaagcctgttcaggcagcattaaaagtggcccgtgtgtctccctgtgttgaggaggattgggccatctctgtgcatgtctgggggctgtggggacactttgctcagctacctgctgctccccttccctgaaaagcaagggctgctattcttgcctgcttcttctggggggcttgttggaggacacactcatcttgggatccttgtctctggtctgaatttctttggaccagtctatgggattcccagactttgggaagttcccattgagaatttgccagacttgttattttcatctgtgatcacaagaaaaacaagcaaacttgaccttcctcctggaagctgctacccaggaggctagtcctggagctaggtcagttcatttattaaagcattcatttattcaccccatttggggtgaatattggctggacaccggccacgtgcaaagtatggaggaggaggaacctcagcccttgtcctttgcactttacaggctagaaggaaagctggtgtcaaagaagaacaaaattcaagccctgtatctagccagagaagccagctgggggccacttgggatgggaccaggtgctaaccgcggtgataactgggagtgacgtggcctgacttataatcaagaaaggtcacccatgtggatatatcagaagaaaacaaagttgcctctcaggaactaccaggaataaatttacactcctctcagtctctacaaggggaaacacagtgaaaacttagctaaaagtgtcacagttgtattgtgtaaactacactgcccttcaagcagcatgggacatcacactgccagggacacgaacactggaccgggagggccattcgcagggcaccacccagggcttctgttggtctgcaggtaccaagacaatggacagtggagtggcctcagctgtctccttggctcctctgctctgtggcctgagccagacctgaaggttttgtcctttggaagtccaccagctgggaacaggtctccagaaagatccatgtgcctgtgcctgattggcagagctggatatatatacatatatatatacatatatataatatatatataattttttgctaattttaatgtcaactgaagtatttattactacaagatattgaagggttcagcatttattcaaaaaaattttttaagctgatccaaggattgcgttcatctgatatgttctcaaatgaaaagggctagataagtcagtgcagctcaaaaatggcagtaacttcagagctggcaattgacacttgttttctgccactgtttactcttcaataaaaaatgcatatttaccatagcaacctcctgatcacgtggagccctatcctacatgcgaccctctaaaacagaatagcttcttaaaggaacacacacatcctaataggcatgcttttcagatgcaaaaacgtgttctttataaggaagccctctttcctgggatttagtgctaataaacatgtcatccttgtagaaatcattttggtcccctgtcttaaattttaagatgttcattctggaaatccaaataaaattactcttggaggggctttcaattatcttaaggatttgttgattatttattttaatatggttctaaatatatatatttgtgtttatacatgcacataggtatatatattttaaacagcaaccgttagtatcatctggaagggagtttggtgcagattctaacgacctgccgcttcatctgtgattaaagattgtcatctatgcgaagctcagtggcagcctgaattgttttttactgttaacttgggaggattgcctggggttttagagctttggaggagctgccccaactggacttttcagggaaggatcatgtcccctcatgctggcactttgtatgtgtctgattccatagcttggagctggcttggggttggcgcgggggcactgccagggacacgaacactgaaagctgctactcaggaggctagtcctggagctaaaaccacagatctgccccctccccatgccatctttacatatgacgcgttgctttggcaatattcatgttgaaagccactattaattggagcataacctccatcaggcaccatgctaagtgatttatataccttagactctacaatcctttgagacatgaattcttgtgactattcccgttttgcagataaggaaaccaagcctcagagaggttatgtaatttgcccaggattacacgcctaagacctggggaacttggttttgacctggggcttttggactgcaaacctctccgcttattctgtcttctgaacctgtctgtcagatttagctctggaaggacaagtggcgacaagatggagaagcctttggagatagggacagtgacagtggcttccctctcagaatgcttcctccagagattcctgggtactctcagtttcagcagagatttgtggaactcttttcatactctgatttttttttttaatgcctgcacctggcagtcaggcacccttcccctgtgctgggctgaagtcagggctggagtgccaagggtctctggatgccacagccccagggagaggtggtatggctgtgtgaccacaagtgtggtcaatgcctctctgaggcaccactgtaggctaaggaggcatcccagccgggcctggtggatttttagtttctttcaatgtgagaaacaagaacgtatttgtgagtctgttatgcttagtggctttggggcaaaatccgattgtgaagtgaagctgggttctccatggcacagaggcattgtgacctgcactccacggaggggcattgcccccaccccgtgcccaggccagccaatccgacggcggcaggctcacaagccatttcataattatccatcacgaatgcctccatgccgccctaatagattatttaaaatggtgtgtgtgtctctcatgcaacctcaagtcagccccaaactgtacatgcgtacagcctgggagaggtaattgtttatcatgtatctctttgttgcagacacttttataaaagagtatgtattatgtatggtgtgaccttcaaatgtcaggaatgtgttttgcaataaactgtcaatatttgtggttataaggtactagatgacttttacaataattggaacggctatattaaaagctgggatcactcggctggttaaagagaaagacacaggccagcgttcatcagggacttgccttctgccaactattaaatgaaagatagtgcaaggtgctcaagatgtcttctttgtttaaaaaagaatatggcaagacacatctctaggggaggcgttatctccaaatcatcccttctcctttcagtgtgctcaattcccaggagaaaactcaactccgcaagttatagtgactgaccaaatacattttaaaaaagattggtccagtttgttcctggtgtcatttaggtaagaattcctggagtcagatcttccatcttctcccctcctccacccccacccaaacaggaggggctgtaaattatcttaagaggatcttaaaagctatagtgttctttttttctttcttagtaaaataaattacgtagacatcttttgggaatttatgctttagtgaaagtagaggcttatactataattttcattttttgtttaaagaaaggagtacttaatttaaattatgaagaagcaaaggcataacaaatattttattataattattatagtaattggatcatagattacattaaaaatatctgtttcactatgctcttctatgggtgagtatctctttatgcttatgtgaagtcgtttctccttatgatagtcagatcttcgtttttaaccaggaaggaattgagtaaatgaaatggggaaaggggcctcacactttagtcttctaaggagctctcttgtggccttgctgattataattgtgtgtttgtggttccttccacctggatggagggagaactgggtgacaccctgaggccccttcctccaggaagcctccctggacatccccaggcctcctcaccctgcaatcatccaactccagcacctgcatgcgctgaacactctggagcacttccgatgttttgacggtgccctggactatttctccccaccagctgctcaaagtagcttccctctcatagtcaggaactggtcttaatatctgaattccaacttgcttgccttccctgatgcttttatttgttgaaaaagtatttataaagcacctgctatgagctgaggacgtctcgcatgctagaaatgtcacggcaggccatagtgcctggcccctgttctcctggagctgacattctaggaaggggacaggcagtgagcagtttaatacacagatcagctgaccatctgtgaagggcgatgtggaaggtgacatgggctgagagctgggggttgggagatttccttccaacagtgcgatcagagacaatctctctcagagaggtgacttttacacgaaagttagaagagcattctaggggaaagagaattccaggaggaggggaagcaggaccaaagccttactggagaagggacgtagcctcagaggagaacagaaagttgggaaccagcctcagaggagaacagaaaggtgagggttggagtgcaggtggggagttgggatgaagtcagagcagtagggaggccacctggacatattgagacacagctggaggttattctaaaaagcaatgaaatgagtagctggtccctgccctgcccccaaccagaggctgttcccaggagatggcagcggcctgggctgaatctctcagactcattctcctgcctgggtcttctcaccaaggccaggttcttaggtgaccctgctcagcgacacgaatggtctctggggtgggctccagcccacagtccctgtcccacagagaagagacaggtgtgcagagcccaaagagacatgtcacacctgatgtcttgtcccaggtcaattctgtgaatcccaaaccttgcccgctgcatccagggttgcagtctctagcctggggactgagagtacctgcccacagccagcccatagccaccccttggggccttggcaagatgtggcggtctgcggatgacaggggatgttgtcacagcagcatcacatggtgccagagggcagagaccccatgggtggcctaatccccagcagggagtttcacagactccaccaacaattaagaacaggttcaggggccgggcgcggtggctcacgcctgtaatcccagcactttgggaggccgaggcgggcggatcacgaggtcaggagatcgagaccatcccggctaaaacggtgaaaccccgtctctactaaaaatacaaaaaattagccgggcgtagtggcgggcgcctgtagtcccagctacttgggaggctgaggcaggagaatggcgtgaacccgggaggcggagcttgcagtgagccgagattgcgccactgcactccagcctgggcgacagagcgagactccgtctcaaaaaaaaaaaaaaaaaaaaaagaacgggttcagggcttgggaaaaccagaaacacatttggcccacagttcttgatcttgaagccctggtatattttaaggaaaatgtaatccatgtgtttctgattcattttcacttaactcatcaaaatgttgctttagagaaggtatttgaaatcctagtgtcttatatttctccctttttctttttttgagacggattttcactctgtcacccaggctggagtgcagtggtgtgaactcggctcgctgcagcctccgcctcctgggttcaagcgattctcttatctcagcctcccgaatagccgggactacaggtgcctgccaccacacctggctaatttttgtattcttagtagagatggggtttcaccatattggccaggttggtctcgaactcctgaccttgtggtctgcccacctcagcctcccaaagtgctgggattacaggtgtgatccaccacacccagcctcctttttttttttttttttttttttttttttttaagaaattagccttttgatgacctacttccccaattccagaaatcgtctcttgccaccagcaaatggaactctgcccagttttgagtttgggtagagggtgagacatggcaacatggaaaacatgccacctctctatctcacgtgtcccagggctcaccagtgaggtccaatcccgaccccgttggtaataacccacgagcaagctgcctgttgcctcctcacaagtggacatcgttttctaaaatagctctttatttaaacaaatactttcaccaatccataagaatacttaactgtttaacatgactatatatggccaccataaaattgagcactctgatgcaaccacagagacaccaagttgatactgacccgaggcatgagttatgtcttctaagagttaggtagaattgtttacagtaatgttataattttcatgcataccattaattttaaataattaaaaaaaataaaagggccagttgtgattgctttatttgagtctattaaagctttcaaaataagggaagtgttaagcttttaacagtagctatacattcctttggactttccccaaggtgtcggtattatcttgctcctgaaaagatcttcaagccctggcatacgtgggcaaggacattaagaaagatgtgatttttttgttgttgttgtgccactgaactgcttcttcaccccttagactccacaaatagttttttttcttcattaatgaagtgagagctgtgattttgagacgttctttgcacaaagcatacttgcagaattaactgacaactcatctgggaaaatgtatttactgttatactagaagctccatagaaattaaaatatcatggcatttgatgccataaacgtagtaagcgccagggtgttcacagagttagtcaccttacccatgcgtgcttgctggggtaactctccagtcaccatcatcattgccaacagcatcatcattataattttttttaatggaagtctttccaaaatgtacttctgggcatctgaagggtaaggctgccagcgagttgggatgaagcgagaaccaagaatccacatgcaatataagaagaagtcattctttcctttctctttgtcctctcactctgcctcttttggtttctatctctggcttctccctttcattctgtgagttaattggactccctggaagattggatataaacccagaagacttcaccagtagaggattgactcttcttagtcaatttctgaccttttcccacaatggctacccccaacatctctatggcttaatataaccaggatttgtttctcattcatgcaaagtgtgatgtgggtcagctgtcatccatctggtgactcagtgacccaggtgccctctattttgtgattctgttgtctcaacctttgcgttgcaaggtcactgtggcccaggaggagagggcggaggaggtgcaggcacactctgtcttcatttccttcatctgttggccaaaactgaccacctgtcctcagcttagtgcaagagaagttgggatacgtaggggtccagggactagttagcaaccatttgccgtcctttttacagtcatttcttctcgcctctttaagacccaacatcagtatcttctttggctgtagggtggggtcagcggggagaatgagaggccaaaaaaaaaaaaaagcagcgggcagagacagcctgggataggcttggagctctttcagcatggcgggacccggaggtctagtcctcgtgggtcagatgggaaccaagggcgaggggaggggtgaagggacttgcttgggatagttggatattagggacccgggaggaaaagattctgcctcctaacgcctgagtcagcatttttggaaaacaacgctattttattatacaaagaagttcagtgtttagagagaatctagggggaaatctacccttcaagtacaaaatcattttataaacaaagttttaatatcccaaacatattatatataaataaggttaagtgtgtgttgaggcacccatccattcaaatcatgtttgtatacagcaagatagccaacctcaggggtggtttcagacagctggtgacagtgttttctaagtatcggggctttaacttttgagaagttgtttgtctttctgagcatccgtttctttgtctaactggtactgccgctttgtggtccagtggatgatgaggattctaaaatgatccgtagccattttaatccccccaactccttcagcccacatcccctcctctgaatacttggggaaagcatgcaccttcatgtcaccttgatcgaggccaaccttgctatagactcggaggataagaacaagcgaatgggcatgtagacaacattgctgaccttgagaagacaaaattaggaaggtctgttgcctgatgtctccttgttcctggtaacagacctttaaaaaacttggatccacctcctttttctttagcaagtcactttcagcttgtaggcacgggcagaggagaaagctggcagagcttttgatgcctacttcaacacatttgctcttggctacagtctaggagggttgcaaatatggcctgtgtctgcctggaatattattcgttgtacccatgcaaggcacccacatctgaagaaataatcccatattattcagtggagtcaagaaaagaaacaagggccacaggagctgtttctcagctgtttctccatcaagtgggagcccagagcacacccaggctgagggtgcattaggcaagagagggcctccccgcctgcagccaaaggtcccctccagggacatctcagtctctaggagctggcaggggtctgtcatttcacagatgagcagggaggaacagatggcagcgttgaggctgacctctgtccacatgtctgccttcagtctacccagcacattagagaaagtgtcacataggagggaaggaataccactggttagaggaaaagaaaattaaaaaattaaataaatctcaaaccaatgcacgaaaggtttaacaaaggatcacagatgcaatttttgtaatacctctctctctgtctttttgttgttgttgttgttgttgttgttgtttttgagatggagtttcgctcttgttgcccaggctggagtgcagcagtatgatctcagctcacttcaacctctgcctcccaggttcaagcaattctcctgcctcagtctcccaagtagctgggattacaggcacgcaccatcatgcctggctaatttttgtatttttagtagaaatggcgttttaccatgttggccaggctcgtctcaaactcctgacctcagatgatctgctggcctcggcctcccaaagttctgggattacaggtgtgagccaccatgcccagccaatacctctgtctttctactgcctgcttcctggagtggctaggaaagggctggtctgtctgcaacataaaccagtgactgctttctccacctgatgttatggggtgccaggagaagtgatgggactccctcctgcagtttgcagaggggcagacgccagtgcttttatactcggggtagagaaggaatccaagagcagatgcacgttcccctctgaatgacactctcaggttcttgctggggttgggccaagttcagcacacacatcctcaccagcacccatcctggcacaggctggggctcacgcacagtgccctgcgggtgtcctgccagcacttgctcccccagccttcactgtgcttggctttcagcctctctggacacttcctgggaccacccacgatagcccttcatcttctctcagcatgattttccagtaggattagtctaaccataaatgccataggccttctggccctccaaaaaaaatcccttttctttgtgaagtaataattagactcttaaatctgcaaagaaaactgtttatcttacaaatttattctttttattgggccacacatatccaagatagaaagataaaaggaaaacagatacaggccatcacttagagtgatgtatagtgaggcagggctcatcctcaagttctgcaaaatgttccacagtgcagggcggccgtatcgctatttttatctgtaatgtggcctgggcaagtccttcccaaaagctccaggagaaatatgccctctctcatttctcctgcagtgtcttcttttttgtgatttttttttttttgaagattcagggggtacatgtgcaggtgtgtggcatgagtatattgcgtgatgctgaggtttgaacttctaatgatcttgctgtctaagtagtgagcatagcggtcgataggtaatttttcaaccttgctcccctccctacctcccctgcccttggaatccccagtgtccatatatatttttttgagacagggtcttgctgtgttacccaggctggagtgcagtggcgtgatcccggctcattgcagcctcgacctctcgagttcaagcaattcttgtgcctcagcctccccggtagctgggactacaggcatgccccaccacacccagctaatttttgtatttttagttttgccatggttttgccatgttgcccaggctggtctggaactcctgacctcaagtgatctacccacctcggtgtcccaaagtgccaggattacaggtgtgcaccaccacacctggcctccagtgtctattgtccccacctctgtgtccatggtacccaatgcttagttcccccttataagagaacatgaggacattctcctgcagctttattccacagtggctccttgctactgctctctggcgggctcctctggaagaagctttatgggaaggtccagagcatgccacaggaggccccgcaggaattacccttctttttttttttatttttcatattttgagacagagtctcactctgttgcccaggctggagtatggtggtgcgatctcagctcaccgcaacctccacctcccaggctcaagcgattctcctgcttcagcctcccgagtagctgggattacaagcacacatcactaccacctggctagtttttgtatttttagtagggatggggtttcaccctgttggccaggctagtcttgagctcctgacctcaaatgatccacccgcctcagcctcccaaagtgttgggattacagacataagccaccatgcccggcccaataattacacttctgaaacctgcccctgcctaccttcatcctgaagccaacatccaggacaccttagtcctgcttataattcaaatcaacagtgattggcctcctaacttaaattaggtatctcgactatgttgccaggagcacttgggcagaattttaatcaggctcatcattatttgaagctgaccttcatgattccagcaaaagggaagctgagggaggccgggagggcaaatgcagcatgctcagggttggggtgggtgggagtgggagaagggtagaaggagatggccttgccactgtctaaagctagggtatgtggttggctggaaatgacatctagccatcactccttctggcagcagctccttgtagattcaacctgcaggacatagagccactgtgaccatatgtagagcatttgtctgatggtgactttgcaacactctcttgtgtccatttgccctgatcaataagccatctttgggggcctttccacattcatttgggcaaccacaatctagggcttggtggagtgactttgagttctagatgtggatgagcctaacttcctacttgtgcaaaattataggaaaaaaaagctaggtaattataccctttgaatagctctccaatgatggttagaagagttggggagaataggattaaagtgagatttcaaatataaataactgtgccagggtgatgatatggtcgtacacagtccaactgcagagagaatgctccaagccaagagtttccacagttgcttagagcgaatactcaaataagaattaaatgtctcggacccagtgtagtggcttatgcctataatcctagctctttgggaggctgaggcggaaagattgcttgaggccaggagttcaagaccagcctgggcaagatagcaagaccctgtctgtgcaaaaaatagaaacttagcaaggcatggtggcctgcacctgtaatcccagctacttgggaagctaaggcaggaggatcccttgtgcccaggagtttgaagttgcaacaagctgtgattgtgccactgcactctagcttgggtgacaaaatgagacgctgtctcaaaaaaaaaaaaaaagaattaaatgtgttgtccttcatctttctcatggtctacaagtctgccgcttttggctgttagcagagaacaccaggaacagacgttgaggaataaaagcagtttgcattttccattgcttggaaggcacagatcttatttattgtgatctctgcagaacccgcagatctcattatcccagaaggttcccttgttctcctagtgggatttaccatgaggcctagagggtgggctggaagctacggtgaggatcaccccgctatcctcaggagcttagattctgtgccaggccttcaggctcctgctctgtggggatgtccatgattctggaagaaaagtgagcccagagaaggttctcttgcttctcctcctcgattccccaattgtgacctctttggcagtgtgatgtcaggcctcgggggctgcaataacatatcctccaaccactagacatttttccagttttatttactattatgtcccacaatttctttgcagaaggcagccatatgtaaattttattccgttttctaatggtttgggttacataacaaataacagcaggaaggaaaatttgtatcgatacttgacagaggaagttctcaagtcactgcaaaaagatgtgtctgcagtgctgtaagtttatgggagttttgcagctgagtctctgcatatgactttgaatatgtcactatatgtttatcatgggctaattgtggaatcacatttccatactttttcttctccctttcatgagattacaccagccagtgatggatacaagactctacaaggaagaaatgatcagttttggataattttctttcctgtcccaaaatagccatatgtctgcatgtcttagggactcagctgacacacattttttttaatttgttgcttgctataatgcaaatatgatttcagtcccatagtgaactctacagtgagtccatattataaattaatcagattcaacaaacaccaacatttttaaacttttgaaaaaaatatttaataggaactaagcaaaagaagaaatcaaaccagctgctgacacagctgtttcttttcttgtttaattcagttcaatataaaggtaccatatgctgcttaaaatggtgataggaaagatgaaataatttaagagaataacaagaaaatacatgaattgtcagcattctgtcagatttaaagaatgaaatagacaggtgtagtattgacatgtttaactttgtgtggtgttagcagttttggtgcgaacaactcctgacatgtgctgaagtgatgtgagaacgtttctccttcgctgcagacattggcgaggaggctgggagatctgccggcgtccagcaaccagcgctgcttcgcgacagaagcctgggctcggccatgaaggactgcccgtactgtgggaaaactttccggacatcccatcaccttaaggtgcacctgaggatacacacaggtgagaagtctgagtgcatccaggggcacagcccagagaaggaggaggtccccgtcctgcctgctttctggcccaggtccacagctgtgtgggtcactaactctggaaggttctccctgggcctgtctagccaccattgtatggctcagaagcggccctcatttcctgattcgtcacttaactaacattcacctcgcaaatgactcagggactcgtaaatgtagacttggatggtcctggcctgggataactgggtcgcgtctgagcctctagggcgttttgctaatggtttccttctgctgtattgaaggagtccctccccaggcgcctgtatgaaccaggagtctcccaggtgtcagtgatggggtctcagctcaaaccttcctaagtgcagaagggaatgaagccacttccccaagcatccaggtagaataggctttagcccagcctgtgttacatgcccagacctgggacagggcagctggagtccatcctcgtcactccatgtggcgtggtggaaaagtgactcttccctgtatctcctcaaagaagaaattgagatgctcttaggcaaaggggggcaagtggctgctgcacccctctggccatttctcatgttttggcgtcatactggacgaggactggctggcaacagggagttctgtgtgtccctcagtcaccgtcctttttagctttctgcttgttgcttgcacattgccaatataaaaaaaaaaatctatcggagatatggacacttccattttctttgattttcctcctgacactttatctattggagtatgagctgcttcagaggctagacaaatatgccatctattttcaaaaataattgtggtttatttcccaaggaatcaataaggctctgggttgcacaggaatattgagtgcacgcgggctgcatgggcatcgcgtggggggagacaagaaacccctcacctggtgcctcacctggtccccacaaatctccctgacaccgagggaagcctgaggacagatgggcacaggaggccatgggccgagtcaccagccctgttcatcctgcatgcctctcttggagtcatctcaggccaaagaggtgtcttttaaaatggtcctccaggtcccaccactctcccaaaaggcctcatgcgacctgcccatgccttgccccggccccatcctgcccccttcttcatccttggcacctttctgaaacaccacctgcattctccctgttcttccaatgcagaatgcctgttccagctgcaggacctgtgttcctgcccctccctccacctggaatcttcctccaggtggtccctggggacttagctttactgggatctattcggagaggctgcccctgactatcccacctaaaacagccctcacatcccctgcaattatcttctttataaacttaacaatttcagaaatgaccctgttgggctccatcgcttatttgtctcccaccaaacagagtctaagatttgcacaggtggcaatattgtctatcttttgaattgctgtcatttctataaccccagggtctgcaagggcactttacacccagtaggggcagatgaatttatctgaaaggttgaatgacagaagaaatgctcaaataagtgagtgactcctcctgtcttccctgcattgttcaaggtggcgcagaggagtcaagggctgtagggaaagtggccccttccccagggaacacaggaacctatcagaaaccacagcctgacagtcaggctgcaagtgctggttgcttgggcatagacaaagtggaagatcctcttccccgggagttcagggagggggccttgcattctgaactcagggtctttgccctttgaacttctctgccagatagttgcatggcttgctgcttccccttcagagtctggctctgatgcccccttctctgtgaggcccacccacatggcagtggaccccccgccccaccaggactttctagaccgctttccttccctgtgtcacttctctccatagtgctcacagcatctgacacaccatgcatttgtatttcgttgttgtttctctccatgcactagactgtgaactccttgagagcaaaggctgtgtctgtttgtccagctgtgtccccagcctagaacagagcctggcccaggtaggcactcagaaagtatttgctgacccaggcattcctgcgtcaattcgtgaaagtgaccaggctcgaaggcagtcagcccagacatctggttttctcagatgatgccaatgtccattttcctccccagattggagccagggttgtggtggtggttgggcagggtggggacccgcagactgccaggatacgggaggtggtccacagggcacccatgcttgagctgcctgcaggagtgtggaaaccaggctaggcatgtcttgtcttgtgtatttcatgtcgacacagaaccctggaccacatttcccagccaggtggtaactctccatgggtaacgtcagccttgcagggtgtaagagtcagtgaggaaaggcggtgcctctcaacgaggggctccactaaccctgtcggcccaagaccagtcagcttcccggggggtaagagaagacactccacagaatatttccaggcaacttaggaccaaagctgacagaagttctggataacctgggagagagcaaatggttattgctcttcgcagttttcaagcttgagaaagactaatgtttctgaacttctgcttcacaaaccttggaatactcttcggagacattgagagagacaacatagggccatggacagaggcattctggaaacttcctagaatcagagagaaaatgaaagaagccatggaaacatcacaccacctccaccacccctcggaagcagcattcgccgtatgtaaaaggcagaatggtaaccagataaagatcaattacctttttatctaagaacaaagaagctggaaaatgcttacacttgtgcatttgaatagaacagaaagtgttacatgttataaatcacccaaataaacatctattatgacaatgtaaaagtgtagattacacaagtaattaaaaatcacaatcaacgtatttgttaataagtgatttcatgtgggactcaagttggtgagaggccctgactgcctctcttttggccctggtgtctctccttgctccaaataccatacagtttttgtatttctaaatgacatggccagaggacagcagtcttattacaaaacaaaaatacatgtactccaaaatgccatctttttgaagtttttaaaccatggacccatatgagcacatttaaaaacccaacgtgtaatataaatatatttttaattgggatatcagatggcaccttctctgtattttttctgtccgactgcatctttattggaagtctcgatcatgtaacatcaatggataaaacctctctcctttttctccccactgcattaactcaattactgtttctcttctcctaacacctgtttgttggagaggtgctgactagatgcaccagtcaggttgttctgaacatctgggagcccgagagagcctatgggtcactaggatgtttctgatgcaccctaagcttcagccaggtcctcaggggaccaaggggaggctgctgcaggatctcgggagtccctaaggccatcagatcctggaggctgcctcactctggctccaggcagggcagacgttgatggctgcttgacccagaggtggctgaacttctctcctcatggagacattaccctgggcagactagggtccaataactggatatggacaatttttattctacagcacagtgtctgtgattcaaattcagagcccattattgcaggctcagaaaggagattgcatcagtcagggttctccagagaaacagcaccgataggaaatgtatatatggccaggcacagtggctcatacctgtaatcccagcactttgggaggccgaggcgggaggattgtttgagcccaggagttcaagaccagcctgggccacatagtgagaccccatctctataaaaggaaagaaaggaaagaaaagaaaaggaaagaaagaaaagaaaagaaaaagaaaagaaaaggagatatgcaccccccccacacacacacacgcacacaggagatttataagaaattggctcaagtgattatggaggctgagaagtcctaagatccaagatctgtaattggtgagctggagactcaggagagctgatggtgtaaattccagttcaagtctgagccagaatgcagatcaatgtcccagctgaaagacagccaggcaaagcgagtgcactcccccttgctcagccttttgttctattcatgccttcaacggattggacaaggtgcacccacattggagagggccaccttctttactcagcccacccattcaaacgttcatctcatccagaaacacccccatggacacacccagaagaatccttaaccaaatatctgggcaccctgtggcccagtcaaattgacacacaaaaattaaccatcacagaaatacatcagcaaacatctagttgtaacatgcaatggggagggcgcatgtccccagagtctcctgagaggttggcaaatcatttcaggattggtctccatgcacccatgccattcttttcctccatgtcccctccctgtgcactaccttgggaagccaggtgcctgggggtactctggaaggtctgatgtatctgttttgtgtgtacaggaagcaggcagatgctgacaggtccctgaaagcctgggggaggcgtgaccccctggtgggtgagcacctcatgcgtggctgcgggactcctggctgggttccctaccgaggctctcccatgtgtgggtttttcgggatggggttgttgtctcaaggaatgaccattgtagagaaatgtaataagcaacttcactcgtgaaaacttggaggcatgaaagttcagggactaattaaaaataaatctcattagtttcttctccctctcgagttctgtgagtggtttattaatctggttttgatgtgccgcatgttccagccccgagtcgggaacctctttgtgggaatggatccgcacagggaagtcagtggtggtttcccagggatttcagctgtggtcacgaggggttcagcattgggctgaagggtacgcccggcaccccccaactcctggctgctgtcttcacggcacagctcctggatgctggctgggctctcacctgtattcttgtccctttcctataggaccaaggaggattgtggaagggagggcgttctcccttgcagcccccaaagggctgcacacccagtcgggtgtagggagggagacctggacattatcttgccttgtgactacaaagcctgacagcaactggctgaacacagaactcagcccgcagggatggagtaacggcacaataacagtgatggtagttcccacgttctatccacgcccatatgcaggctctgtgctagacactttgcattaactcgctccttcatccctacagcacctcagtcaccaaggctccatcccctgccccgcttcaggggagggcgctgagcctcagagacagagaggtgaagttatcccatcccggagttgtccaggcttggattaaaggttataatcagatctgcctaattcagaatctcattctcttcaccgctgcattgtattgctactttttacttttctgagtgaatttctggcttgttttagggaattaatgcaacatttctttgacagtgtgtgtccacaccatacccaacaggaaggaaagaagtgacttgtactcacaagtggtgttggcgcagcctccagggaatttaaaagggaagtactgtgcaccccagctcctccttgacccctccctcagactggccccaggccaggcttccttggccccacgtgcttgggtttccccactagcacagcgaggttaggggtgaggcatggccactgtggcatgtggaggcgctctgacctcctgggatggaaacggggtgggggtgagtgggagtggaatcacttccagcatcacagagctgataaactcatgctatggtggaaaccacctttcatcttcaaagtgcttcccgagcagtggctggtacataaacatgggtggaaatgaaacttccagccggccccatccaggtgccttatggctggtgtctacgtctcttacatttgatgcttctatgtaaggtatctaggctgttttcacacactgagtaaatataaaagcactttgcatacattttcaaaaaggaatcagttaaaatgggtgttcttctcatttccttttccaaaaagagagcatgcatttttgccgttagtgggggaccaaccacctgagtaatgatgaaaaaaaaaaaaaaatctccaaaaggagataagtctttttttctttttgttttgaattaaaattccatcatttttctatatctgagaggaactaaaagcccggtttattcctcctctgttccctatccttgcttttcctgccttaatgacatcctaaacttttgttgaaaataattgattgaatttaaatttccttaaaagttgaagaggtaatgttacagtataaatttcctaccaaacactaagtagggaaatatccattagtgaaattaactacagtttctaggtagctaacaatgtgctgtatacagtagggcatggctaatgaacactgcagtgggtgatatttcattatacaaattaatgctcacattttaatgggaaagtcacataatgaatctgggcttcagtgacagcaattagagacacagattgtccccttctggacaaggcactgtttagcaataagcagctgtgtgaaaagtcttcaggtttacaacatatatatgctttgggggaattagtgtacaatttatattaatgtactgaagctttgctgcaaagacaccaccatatttatctctcctggtgttaactaagtgaagagatggagaaggactaaataaatatcaaattgaggatgcaaatacaggaaaatattcagttgctcaacttaaaagtgaaacacttttggagatttagcaaaaaaaacaaaaacaaaataaaaaaacgagaagcatgaatcacatcttaaaccttaaaatggtttccaaagagaatatgaatccacctgttatttttggagaggtgctggtgggaacttgctctaaatagctctagaataactccctggaacagtgagggttcctttgacatatcaacagcaaagtagaggctcagaattataaaagatatgagcatgtaaaaataggtaccgtgaactaattaaaccacctggtcgtatatttctagaaattgatgatacagtgacttgggagaggttatcaatgatattctaaagctaaatctatatcttatgccatgtgtcagtgggaagctggcttactgtacgacagtgccaataatttcattaatcaattggaatgatgaactgcggccttttaatttcattatgccttttctagcaaaactcttctttctagaaattcattgtttgggcccacatcttactccttaaaatatagtgagaggtttccccgcagaaggctaccagtgttcgtagctgcttcctttagtgggcaaagagccccattctgcacatttcacaatgactgcctgctccagaccccatctgtaaaatagagcactgtgacccttcagtgtttgaaaagttttgagataggtactaatatttaaaaattaagatactgcacacagaaacctcatagatatgacacttttcttttttctagagacagggtctcactctatcccccaggttggtgtgcagtggtgcaatcatagctcattgcagcctccaactcctggactcaagcgatcctcctgcctcagcctcccaagtagcttagaccacaggtgtgtgacaccacacctgcttaatttttaaattttttgtagaaacgaggtctccctgtgttgcccatgctggtcttaaactcctgggcccaagtgatcttcctgcctggcctcccaaagtgctagggttacaggcctgagccaccatgcctggccgagacttttcttggaaaatcaaaggttctagtgcccacagttggttagagttgagtgacactgtgctccaggagagaacggctgttttgcatactcatctgatctgtgtggttctgcctgcatgcaagtgtgtggcacatataacagataaacacaaagcaatgaaccacaaacatcatggaggtcaccataggactcttgaccccctggaaaccttgggaggcagcctgagtggtcccctcagtagatgggactcatttatggcctaagtggccaatcactcaactagacagagctgctggcagggtctggggctgcctgtaccatggggctgcccaggcaatgcagacctgagtctcaggcagagtccagccttggttgggcagggctaggcaggcccaatgcctggctcttttggcatggatctggccatgtccggaggcctgggatttgctagagttagcccagagcgcttgggtagaagagcacatccagatgcagaggccttggctgggaagcggttctcagctcaggtagactcagcatctgcctgtgccggccaaatgaaagagcagatgtagaccgcaccccggagcctgtgaaatgtgctgttaggcctctccttgtggttgctgccccaccccgtctaggccaacgttgtaagtagtttgcctcctgagcactctgaaatgggccctctgaggaaagaatgcctgggaaacagctgggatgtttccagtggagcacaagaccctggggctgctggggctctaaggaggttcacagctcaacctctgggtgtgcctggctagaaacatgccctggccggggctcactttcatctccaaagccttcccctgtgccccttgttggataggaagcccggaaagggaagcgagggctttgagatagagggcaggggtggttcttccaatcatttagcgattacgaggaaattaaaattgagcttgtttctttgtgaacataagtccaaaggggaagggtttatcccctggaacagcgtgcccacctggagcacttaactgaggaactgggatgatcggaagaaaccacccaaaccaagccctttagcgacccggcaggaggtggaactgtatagagaaatggacagaaagagcaatgcagccctttcatcccagtgcagaaggcagaggaagcatgggtggagaactttctagaaccttgcatagcacgtgcattcagaaaacccttgaaagctcatgaagcagcccctaattcaccaggcctgggcccgtggagactccaatgctaggaattagcctttcttgtttctcagctctggcttttattctctggagcagtgagggccaaggcctattttgaactctaaagacagtgggtggagtgaagggatgctatcttcctgtgcactcgcatgctgtgtgtgagtgtgagagtgcgtgtgcgtgaactctgctagcctgctatatgatatgtctcctccaaaagccatgagagcagagaacctacctctttggtctttactcagtttccagggtcaagaagggaggtttcaggtgtttattcattcatccattggttcactccatcaaaaaaatgtgtgtgaatcaaactgaaggtttctgagtcagtgggtgacaagtatgtgcacaagtagcactggctctattcaggagacttagtttactcctaaacgagcttaggattggcgtgagaccccacagaacatgtgcttcaacatgtcttattacaggttgaggaagaaaaagtcccaagaccaggattctgtgtccagtggaattcagagtagcgtgggtgtccagtccctagtccagattctcaaatacctcctgaggtctagactgtcttccctgctaaaccattcatggttcccacttcaaaggcacttccaaggaaggctgcctacaatggttccccactcaggatccacagagggccacctgggaaagtcccgaaagatcccgaaaccaagtttgcatctttggccaattaactcagaatgtggggaggtgggaccaggtatcagcacttcatcaagcccccaaggcaattccaggatggtttttcaagggattgtctttacatgtctgcaccagaatcatagggacgcttacaaggccaacttctgcgccgaccccagacccagggaatcagaactgctgtgccttagggccagaactggtgtcttaccacactcccctggtggttctaatgcacaatacagtttaagtactacccgctcccatatgtcttttttttttttttttttttttttttttttgagatggagtcttgctctgtcgcccaggctggagtgcagtggcgccatctcggctcactgcaagctccgcctcccgggtttacgccattctcctgcctcagcctcccaagtagctgggactacaggcacccaccaccacgcccggctaattgtttgtatttttagtagagacggggtttcatcatgttagccaggatggtctcgatctcctgaccttgtgatcctcttgcctcggcctcccaaagtactgggattacaggtgtgagccactgcgcttggcctcctgtgtgcctttcaaacatgtatccattggaaatagacacacacatcctctgtgcatccccacagtccccacccagaaaggcagccctccacattcccaggcttgagaggaaagtccaccttccccctctttagctccgctaatgaatgcccgtgctttctctatggcccctttgcctgccagatgcacataatcatttccaggtgcatttctaaaacacagcctgagtcccaccaggcacctgcgggcctcacctctgcaggctttcatcgcctggccctcccgcagggcttgctctcactcgtagggcaggatcttgagtttctaggtaggcttgcctgctgtgggccccatcacaacccctctaagtttcggggactgcctctgttacacctgatcactgggcttccagataagctgaatcagccatgacatcctgctgcccagaagtgccccatcccagcctggcctgcgatgggatgtctacatagcagtagctcaatgagtctgagtctaacctgggactgactccaagaagggggaaattactgcctgaaattctctgtgcctttaccccaaaggggatagagacttcctcctagattcctgtcattggtctagctagagatgactgtgacctttacgtttagagaaacagattccctgctgggttcccttcctagacctaagggccacctctgaaaaagtgtccaggagagatctcagctgctcatagcaactggcacccttgttctgataaggcaggcagggtaaccacggttctggcacgtgatctggagatgacatggcatctcctgctcagaaccaggctggtggccctcttgctcacaaagtccacgcccccaaatgccctgtgcctggagaactgggactcatgccttccgctgagactagacacagtgaaatgtcttcagaagacaccattcactgacgatttgttgttactttttagatcagtctattttacaatagaacagaggaaggggagggggaatagttgaggttcctggaagaaataattgtggatattgacagggcaccattgtgaataagagagcggggactgtcacagtccccattccttccagagagccttttgattgcaaagtctggaaaagacctgggattgctaacaaattcttggaatatatttaaatctgcagtcgtttaccttcttccccttctctatcccacaatgccagcaaatgtaagttgtctcttctggtatctttttccaccgtggaaagaacaatagaagttgggggtgttgaatttaaataaatatttaattcatgaaaattatcttatatgttttaaaacactctttaaagctatttttattctctagaaagcgcttattataggtaaattacacattttactaccggagcattaggtttgccattagtacaaatttaaggcactacaaagaccagtagataatgttaatttcaaatacagaaactaaatatattttgtgcctttttattactcattttcttttaagttttattgactgctttttatcttaactatatgtctttacatgctgcaatcataatgcactgtaatggtattaatattttatagaatatgtatttatagttctttatttagaaacagtgcagtaggtctgcagatatctgagcccgtctggaatggtgccctccaaataatgataaattacttgtgcagtatgccatttgctaattatatccatgatttactgcagagcaagacttaaatcattcatttcagtcttgcgtaacagtgccataaaatttttaggtttaaaaatggtttccatgtgtataatttaaacaaattttagatctattgtatacacaaaatattgcaaccacccatttgttacatactttctctttttaaacttctacttttaatgatcactgtggctgaaattattatgcttaattttcataatcatagcttttaaatctacagccgttttcacatgttagataaagaaaaagatagctaattgtgtgtagatagtatgtcattcctgaatagtcccaaatggtacaaaatcattaaaaaagcttaagagtacgaattattcttctattaaaaaacagttgttctctaattattagtttgagctgctttgtttcaaagaacaaatgttgatccttccagcctcgttcagcacaccaaaatgagataaacgcctcttttttttcttatatcaaaatcttgcaggtgagaaaccctacaagtgtccgcactgtgactatgccggcacgcagtcagcatccttaaaataccacttagagcgacaccatcgggagcggcagaacggggctgggccgctgtctgggcaacccccaaatcaagaccacaaggatgagatgtcaagcaaagcttctctgttcatcaggccagacatcctgaggggggccttcaagggtctccctggaatcgacttcagaggaggccctgcatctcagcagtggacatcaggggttctctcctctggagatcactcggggcaggccacgggcatgtcttcggaggtcccctcagatgctctgaaaggcactgaccttccttccaaaagcacccacttctctgagatcggaagagcttatcaaagcattgtgagcaacggtgtgaatttccaagggtccttgcaagctttcatggacagttttgtcctcagttccttgaagaaggagaaggacatgaaggacaaagccctggctgaccccccttccatgaaagtccacggagtggatggtggtgaggagaaacccagtggcaagtcctcccagaggaagtccgagaaatctcagtatgaacccctggacttgtctgtgcggccagatgccgcctccctcccgggctcctcggtaactgtgcaggacagcattgcatggcacggctgcttgttttgtgctttcacaacgtcctccatggagctcatggcccttcatctccaggccaaccacctgggcaaagcgaaacgcaaagataacaccatcggggtcacagtcaactgcaaagaccaagcccgggaggcgagtaagatggccctgctgccctcgttacaatcaaacaaagacctgggcctctccaatatgatcagctctctagactctgcttctgagaagatggcccaaggtcagctcaaggagactctgggagagcagaagagcggtgcatggaccggccacgtggaccctgcattttgtaacttcccatcagacttctacaagcagtttggtgtttacccaggcatggttggctcaggggcctccagttcctgccccaacaaggagcctgatggaaaggcccactctgaagaggatgtccccatcctgatccccgaaaccacgagtaagaacactactgatgacctctctgacattgcctcctcagaggacatggactcctccaagggggagaacaacgatgaagaggatgttgaaaccgaaccggaaatgatgaccaagccactgtctgccctcagcaaagacagcagcagcgatggcggggacagcctgcagcccacaggcacctcccagcccgtccagggactggtctcacctttatcccaagcaccggagaagcagtggcacagccagggtcttctccaagcccaggaccccttggcgggcctgccaaagccggagcgggggccccagagcctggacaagccgatgaacatgctgtcggtcctcagggcctacagttctgatggcttagcagcctttaacggacttgcaagtagcacagcaaattctggatgtatcaagaggccagacttgtgtggtaagttttagaatcctcttcctatagttcatttcccaaaacatcagtgctgaattgtgcatttaaaaaaatgaggtagacttatccatgagcaacttttgaatgaaatatttgaaaaaaccctcaatgctgtatctgcaatgtagacaatcataaaagtccattttgtttagaagttttagaactcatacttttgtgttctaatttgcattataatgtactaaaatgcctgtacagaaggcatggaaaagggggtggtcgctcaccatgtgaactactcctgtttgccatctagaacttgaaggggggaaaatcgacttacaaaacaaaaatgaaaagagacatggtaacttgcaaattcttcagtattttcaatttatgcaaaagatgcctaaagacaattccttactgctttgctaagccaaatctgctttcttaaacttttcttttattgacttagaggatactaaaatcatatcacactaacaacagtatggaaataaagcgaccttctctccaaagagggagatggtttctgggtgtttgtgactcatttttagacaaaccaaatggcagttactgtgactttggccttctgcgcttgccttctgtttgtctgtctgttcacctgtctgtctgttgctctaacaagacatgtacattgtgaagtccctgaacagtagtggtgtgaccctgtgcatcttggattcatgcttgtctgatcctgtagcaaactgacacttctttatctccttaaagcatatgggtaccccaaaggaattccagatttccgaacatcattgtaagtttaaggactaggtttggatcaaatgaatgtttgggtgggcagggggaatcaaagtcattgtcttggcaccctgatatctgtatttggaagcctttctccgaaaagaagctccatgcattcttccctttgaaaccagctccaaatatcctcaccagagacaaatgaccatgatacatttccaactgtaatttatgaatggatttctgtaattttacttcacctgtggaaggaaggcaggaaggcaggaaggcaggaagggaggagggcaggatggaaagaaggaaggaaggaagggaagggaaggaaagaaaagggaaggaagggggggaaatagaagagagtatttttgaacctcaacatcctgttgttcgtttaagcacagagaagaattcaggaagctagactctgggttcataatttagattgatatatttcttttattcctcttcttccctaattcactaggaactgaatcaagcggtcagaaatatttttttgaattgtcgaaaatcactaaatggatttctgacagctcaaaaaaatattgacagttccttatgctgaatgattcacaaggccccattaaccactacccccagatctatttttagccacatacaattcattacttttgaagctgttaaaaacaatatttaaaagaagggaaaaaagcgttttatgttagtccaaattttttccccttttttttttaaactgggggagcaatgttgaaggcttttttttctttttttcattgttgttttaggtttgtgatcggggtggtttcttttttattgttgtttagagtcttttttttttttaagtctattttcagttctttcaactacctacgtaggaccatagtccctgccaggaatccatgcatcagaaaagatcaaaacctggcatgttcatgagctcattattattgaaatgagctcatattacccctattaattttcccatcttcctatcagtaatgaaggaaggctgcctggctcgaggaagtttgcccagtggtatcctttcgcaccaggcgaggttgaatgggaagccaacgtcagggagcctgccgggtcttgagagccttttatctctgggctgcaagctcctaggaacttctcaccttttcccaaaacagcagcacacgacacgtccctgacatttccccgctatgtgcaaaccgtgttgcccagtccacccttcagcctttgggcagcagatcctgggatgtaagttgtgccccccacccctcgcctctttcatggggcttggggaccctcatgtcagccaagcttgaaggcttcctggttgcttctgcagcagagggttcaggccccttgttccgccttccactcctgggaagatgctgaaattgactctggccacgagctgcctatttttagagagtgtgagttctgcattccatttggccccatttcttctgtgtcctcttgctttagtttggaagtaggcaggaaaagaccctccctggctcttgcatttgcttgggggtggggccactgccctcttgcctctaggatgggcctgactctgccagttctcatcccactccccccatatctggcccaccataattgcagtcctcttcttattttcttgcgggctactgtgatatcccagaaggtccagacatattcatcctttctaaaagttacaacctaggaggaacacaaatccaaatgggctgttttttttttcttaaatagtgtaattcactctctttttagcatggcaagaagcacaagtgacatttgtaagcttcaaacccccactagcttccctttgcaagggtagaagtgatattagcacaatgaataaaatatttctaatgtttattcctccttctcttcttcactcaaagtaggtatgggtttctaaatccgcctaccaggctgatcactatttctccttaagaatctgggctttgtcagaccaaagcatcattcctagatttctcatctcagatggataaagttgagggctggttttgtctggttagtagacctaaatccccactttcatgattatagaaacaggcttataggaggagctaatgttcccatgtttcttaaggaagggctctgttctcaaggggtgtaaaagtgtttgaacaagcatcagaaatacctagttcaaatcatataaactccccacagatctcagcagctcctccaacccttgctgttgatttggagaaggtggcatctcaccctattctgtgggtgatactcatattgcaggctgtactttcaggatcttccatcatttctgcatgccttcttcctaacttttaaaactctggtcctaaattccttggtgccatagagccagggtcctggccagtgtgccctgcccatcctaacagccaatggattcctaactctggtgcagaaggagagccaccgaggggagaagccgacccagccagttgggtggggagacgcctgttgcatatgacagtgtcgagagcttcagtgggaattttctaaagctctttccacagaggacagcacacggcctgtcagagacatattacaataatcccaaggaagaggttaagccatcttggattaagccagaggacaggcatctttgcttccacagtgggtcagatcccactaggggtctgatctcattataggaaatcccactccaatcaaatccttagtttcttgaggtgacttccagtctccaggcatgggtcacatgtctttattctgtcaaagagcataatgtacaagggtactccagtgccatcggagaatttggatatgcccttggttttattggaatgtttgaccttggttttgtaatgggatagactccacatgagtatttaaaggtggagaggggaagaccagagcagtgtttgcatccatggacaaagcaaggcagataagcccagtctagtctgagaaatgctaatgcactgttgggtcggcacttggctgggaaggggcaggcttccctgtgcacacagcaccaaggctggtctgcacagcacccatggggcccactgcatggaacggttaaaaagtgtgtttcatctgggagtttgtggatttggacagcaaccagatcacccttactccttgcctttcaaacctaagagagatggccagggtgtggagttgttgtgtgccaggtctcccagtcaggctttgcactgtgtcctttggtggacccaggggtaggcaggacagagaagaatgaatgacagatgaacgggaaagcagggaaaagagcacactcccctttgccccaaggagctctgctctgtagtgactgccactcagggaaggctggctgaactggtagcatctgtaagcaggctgagggcaggcactgcggctcacacctgtaatcccagcactctgggaggctgaggcaggggcgttgcataagcccaggagttcaaggccactgtgagctaggatcatgacattgcactcgagcctgggtgacagagtgaaaccccttctgtaaaataaacatgaaataaatatcagcaagttgattgtgggcacgaggccctatgtgcagtggctaccagacctagtgacccagtgggcctgggaggaagtgagggagaatgcaagcccattaacagcagtcatcctaacatccccagcttatcatcctcaggttattgggcaactggcttccccaacccaaattatacctgagactatggaataaaggtcttctgggcttccacattagtgaaataattgggacccccccccctcccaagaattcgggtccattgaaacctattcaaattacatatttttatgtgtgatgagatgaaccaggacaaccaaagctgaactctcttaaaatgtgacttatcttttccctaagccttatagatttcttggcataggcagtcggagaatacctacttttttttttttttttttttttttggagatggagttttgctctgttgcctgggctggagtgcagtgtgcgatctcggctcacggcaacttccgtctcctgggttcaagcgattctcctgcctgtctcccaagtagctgggattacaggtgcacgccaccacacctggctaattttgtatttttagtagagacagggtttcatcatgttggtcaggctggtcttgaacttctgacctcaggtgatccgcccacctcagcctcccaaagtgctgggattataggcatgagccaccgcgcctggccaatacctacccttttacgagctactcagtctaaagcaacaggcagcaaatattttcttaaagggccagagaataaaagtgttggctcacaggccatggggtgtctgtggcgaccacccaactccgctttggaagtagcaccacagctaccatagacaataggaaaatgatggctgtggttgcgttctattacaactttaggtactgacaggcgatgcactggaattggcccacagggtcttatttggtcaacccctgctctggtgtaaagagggatgtgttcccgtggtcatccctagggaatgagtggtgcaaacactggtcctctgttattctgctggacagtgagatggtgatgggagacccctcatcatcagtggcagggccccatccattgtctggtaatgccaaagccagagatgtgagagagactttacagtggtagaggacttgttgacccagatgggccgatgccttgtttctgggaagccacacctctgtctatgcattaaagacttccaggagaacaccccagcacagtgcaacccagagctgccccctcatagccagcacacacagaagaggaagcgggcagtggctgtgtgttgtctctgatgcaagcttgctctgtgaaagcctgtttcctcactgatggaaggaagcgtagggatgaaatagatgatagagataaaagagcttggatcagtgcttctcagttgagtttgcatgacgtcgtggagctcagcatccacgtgaaactgttgcaaggaaatgatgtcagtgtgcaaacatcttcgggtcacaatcgtcccttaagcacggcaggcatcaaccttacctccatcagtgttagagaggcacgtttcatttcctcacttctgccgtgatgcatggttgatagctctttcttggtatgtggagaagtttgctttgaagatgattctggcaattttgtgatgacctcccatcccaatggttacactatttctgtgtccactccattctcttcctgataccaggcaagtgcttgggggtaggaaatgagtcctgccctgcctcagtctttgaccaagaaacggcaaaggtctgcagtcaattagagacttggaaggaagccatggctggggtatgaaatacacagtgagggccgcatatgtgcagacaccctgagtataggctgtgatacacaggctatggccattggtacatttttcatcttgtgcaagagtctacagtgtggcccagaagccagcaggttctaatgaagaagggaggtgaaggtaggaaaatggcataggaagacaaccacaaaatcccaatctgccgagtgtgtgggagtgcaggctgtacccagccagcacaagaaggcaattggcttgagggtgtgggagacctggggcatctccactgcaagatctttttgtctctgttgctgccttactttattcaaagacaaatgtgctctcatacctcttccttctcttttttgtgagctgattctcacatggattggcctcagagactatggataaagcacacctttgcattcacctcctttgcccaattggataatttacagattagctattgacctctatggtctggcctgctctcatttgtactgtgtgtccggggcctgacattagaccccaggagggaggaccatttggcctgccttgaagtccaagggcagaaccttgtgagttaatgcaaatcaccgccctgttctgcccctgctggctgcctcacaacctgctgcagagcttttctgtttgactctggagggacaaacacaggcgatgtcccctaggatctcttgcagaaatcagcacctggagtgggctctccccagccctcatcctgagccctgctgtgtgcactgtgtctgatggagaggcagcctctctggatggcagctctctccatattccaaaggcattcttctcctgttctccttccctctttttaaattaaatgggaatgccactgacgtgatgtcgtttgcactgcaggatgacagaactgttgtgtgaataccattgtatttgccaaatggtccactcgtcatttcagaacaaacaaatggatggtgtctgtaagtcggcaaacactggtgacatttagccttgtttatgttcctttccttttgctgcatatttttggctccaaaagctactggctgaatcaacagggcctctgaatcaggagagaagtctggtagcattaattttagttgctatgtccatattctcttcagactgcatgaatcctactgctcaggaccaagtctaggtgagaggagagggcaatcaacctctttggtttcggatgttgtgtgcaaagcccagggttcaaataagcagtaattatctcctattacttagtgctgatcaacagcacctctacgtctaattgccaacctgccctaatcatgttgactattcttgctttagccagagacagaaggaccaaattttataaataacactttattgtcattattccattaaacgattaggggatgtggccctgcccttgctttcaaatgcctctagccctgatggtttctggattatttaataaatctgcacattttcttgcaggtaagtgacactccctgtcctagtcggtctatctggacttgcccttgtctgttcgtggtcctcggtggttatctgcagcttgttaatcgtgtaaagtcaagagaagaatgtatacacatatgtgtgttgaataattactattggcataggtatgtgtatacacacggtgcaccaatctacagtatatatagcagagaatcagaggctaaaaatattaccccatatgttccagtattagtcatggattgcaaaggcttagtaacttgagcaggagagaaaactccctcaaagtcataaatcctgagtgacaactgctgctggatgacagatcccttcacctgtggacaacctggctgggggtggggggctgttccaccagctcacctgagcatgtagaggtgggtcctgcagtggtctcgtgggtattactgcttgtgtctgattgtcctgtattttgtaacactttagaagaatacagaaaagtgcagtaattctctttctccatagtatttaagcagaaatattgctagtttaatattgtgtcaggtcgtcctattaaccaggagcagatgacagtaaaatttcagtgaatagcaccttgacatctacaacttaaaaatggtgattgaagcaaaatatgtaaacttgtacggggtgatcgtgtgctttggaacagagtattgttgaagtaattagaagatatattaaggtgttcctggtaatgaaggcatgtaagttataataattgtagctttctgaataagtgtcaaactatatctttaagtgtgctgtatgctgagttacaagttaggtcatttatgaatggaatgtaaaataatactaaaaatgcttcaataacttatcttggtattgctaataaaaaaaaaaagctgtgaaacattagtgcagtttggagtcattatgttaattcattccgcaacatccccctcaccccgacattcttctcactgttggaagcctcaacaggacattcagggaatgccattgaccctgcttcttgggctgtttgccggggcagatcattgcatttttctatccactcttaggtgggccctgtgagtaacaattcataaacatgcaagtggaaaaggaccttccaatttgggtggatgactgtggggggtgggggagagccaggcgacacgggcccgtttctctgtacaagtgacttttaggtgtctagaccccacaaccgcccagaggaactgtggctggggtggtgggggtggagggtacttgggcacggagtatgccggccatcatgccccatcccagatgtggaaacgctgacacccagcctcccttcagcaaatctgaacatgttcttttcatcctgcgaaggggtagtttgtaatgaagagactcaggattcgcggaggtgggaatctttatgttctgctgaccttttcggactgtacttgtgtttgctgtaacaggcttttgcctgttgttccactttgcctcctggtggggagagaggtgtgggaagaaccgattttgctttttgcttgtgttgcttggttttgtggtccgtgagctggacttgagggtcctgccatttcaacggtgtttccaagcttctttgcttggatgtgttttgtaaatttctaaattcaatgaccatccctgagcccttgtctaactggtccttttgggggactgggggtaggacacaatctcataggacacaatctcaagctccaagtccgttcttcacaaccccaaataaataaagtgtcctctgtgtaacaagggaatggaaacccagaaatgctcattgaacaaccctggcctccgcaacaggacaattgcatcaccctagctggttgaaacatttcttccggtatttctcataaaaccttttcaagtgactctgactccaaagaccacagtatggcattaggttgtcttttattttgggaaagaggtaaaaagtgagagattcggagtctgagaagacacgataaaagcttcaaagagaaaatgtcgattgtgaagaaggttgtcagatttcctggtggtcagtgcccacgactgttgcctgattcccttcatatgaagctgggagcacataccatgggttcctttggaaactgtgatggatccctaaatgcctagcaaaggtaaagtgaatgaccctaacctccaggccccaggtctgtgtggccacatttaggcagggccagtttccactgccagtgtatataggccaagcctgtacaagaagtagggccccaggagaggtttttctttatttgcaatgtcccctgagtctaaggacctgccccaaggggaatggggtgcacatcgagggaaaaattcctccaagcctttttctcggggcctctgtccagggctgagcacactgttcctggcgttgccggtcatgtacaccccgctgcccacttcctgcaaacctggggcaccatagcacctgtgggttttgccagtcctcctgggatggggcccagaggggtatagatggcatgtggggggctgggctttggaggcagagggagtgcaaagccagtgagggagaggctgctgaagggaacggatcttcccagccctttgcattgacagcctggaaggctccctggagccgtgtattcaggcgtctgctgttctctcttcctttccatgggggcccaatccccctaacgggatctccaagctggaagactcggaagcatttccgtttctaaagcagggggtatttcctgagttgctccccggtggaaacttctcaagcttagagggggcctttgtggattctcattctcctgcttttatgaagccagctccgtcctgctccccatcttctcatttcagggcactcacgccgtacactccccctgcttcccatccacctcctcctcatcatccccatccctggttaacaacttccttctcaacagttgcgtgttcttgggaatatcccgtcttctgcctgccggggagctgggtggattcagttctgtggaatgagccaacttcattttacagctctgcaagggggtcaggaattctgtttcctgtgtgttccttccccctaagccaccttccatccccaagtgggattataacaagcccaccatccccatataccaccatccatccccacatgggaatataacaagcccacctcccccataaaccatcatccatccctacgtggatatataacaagcccacctcccctgtaaaccaccatccatccccatgtggaaatataacaagcccaccttcccccaagccaccacccatccacatgtgggattataacaaaccccacctgtttgaattcagacctgaagcaaatgtaaacatcatccattggatctaccctcagcctgagacctggacccttcctaacacgaacaccctggtctggataagagaccacccccccgccccattgtatatggagcagagttccaaggagacatctgtgacttaagatgagagaggccaaggaagggcagagtgccttgcagtaagagagtcttcagatccacttttctatttacacatgttcggaagtgtgtttgctttgatgagattgtagatattctggttggagaaaaagaatctaaatgttgggagatgattattccataagtatagtcactttttctcaaagaaacttcgcgatgattaaattacatccccaaatcggcagcagtgcattggcaatattgtctctgcgtaagcagattctgcctctggagcaagggatgcgcattttcaaggttaaagttggggaactctgcacagctatttcattagcaaaaatagccatttgtgcatccagacattggctggcttcacgaggggtttgtctttcatgttctttgtggagttgtccagacacacccatctaatggtaactcactgctcacaaggttaagttttctttttgaacttctgttgttgtcaaattaacataatatgctctcaattatccacataaaaggagaaaggcaaccaagcggggaaagcaaatttgcaattaatttaccaaattattgctctttttatatgatggacaagttgcttttttcttgagttgggatttgtctctactgggaagagagctggggttgaccacgaggacaggccactccaaggtgtgccctgcacctggggaagggctgaaggtggttttgctgaggtgcacagtggccccagtggataattagggactcacactaggattagctctttcttgtcaagtagaggggtcgttagtcctctcaatcccctaagacttccttggtgacctagttgggtctccctagagcagatcctgaggtaaggacctggatgcaggcagtagatatgggaggtgacccaggaagcatgagtgagggagcagggaagggagacagagaaggcaggtaaatcaacaagcacaggtgcactcatgagagggtcagtactgcaggaccatgggggctcagcccctttgggggtcctctaaggtactacgtggagctcctcttggaacagtctcttcaaggattgaaggagccggggtatttacacaccagcttttcctctcccagcagctgagggtccctccagcccacctgatggccaaccattcttcccatagtgagagaaagccctcaggcagaatgaagcaagaggccattggtattgccagataatcagataatcagaagggaaggaatgaggaaccaacagtatctgcttcaagtgagaacaccctcttgggtacccagtagaaagtcgcagacctaccagagccacagatgagaacagatgtgcaggtcatggctcctgtggagagggaagtgcatggcctctcagcttaggggccaggttactggaggaaagactggcgggctggtctgggggagaccttgaagcaatcatgttccaaggagcttagataactcacgtgtcctctttgggcaccattttcctctcagccaaaggagggagcattccagatgtctgctccggaccctcttaggtcttaaactctatagtctccaccacccttttccagtcctcacttttcagatgactcctccggaccctgtcagtcctggagtccccataccagtagggcccctgggatatgttctggtttcccacaagcataagagcatgcaggctttctatttgggcaaggccatctgccattccagtgcacgggcatatgaaacttgccttatcctgaagatatttctgttaaattagaagaagaccattgaggattttcttttaattgtggaagtctgttaaaatagcaaaagaaaagaaaagaaaggagatcaatgaaactggattttcagctcatggaaatgcaagaaaaacctgattatctgacttttttctcttttatttttcaacctgtcgagctcacagttgagcttgagaagactgtattttttatgatgatcaggttatctttgagtgctttacagataccagtgtgtgaatccaggagttcccttttggataaaagtgcctcctgctttctttcaatacatgtatccatcacacttagagggtgggaacccaggcaccgagagatacgggctcaggctctcatcttgcactcacggggcacggaagcagttcacattcacttccttctgtgcctgtgaccatcccacttttccatcctgagaattcccttggtcactcaaaatcactctgagcttgcaagcccggggtagtttggaacagtatgctctgtctctacatgggaaagctttttgctttcaattggatatcttgtcataggcatttcttaatccaattgcctcagtgttatcacccatcaaatgaggcactcgtgtatcccttaagagaataaagtgaatatgaagaacttggaggttgtcgagtcaccctcatttcaattattttaggctttctgcagccatgtaggctccaggcagagcttcgatgaagaccgagaacccgctaaaaccccgctgagtggctggagaatctgggcaggttattataaatcatggtgccccaccctcatccttgccaatttgtactcaccgctggaaggtctctttctggatggcccatctgggattcttcccatccctggggtgaacacatctggaggtctgttggggaacctatatgataattcaacaagcccattcttgcgatggacagacacacccccattggctccaactgagctgttttcactgttttctagtggtaaaaagtatttaccattaggaaatttttaaaaatcatctctcgtggccaatcggtggcccagattcttgtatcagtggtttttgggtttcattaagactttgggctctacaactgtcctttctaaatgatacccagtaatttaattttaaatcacaaagggaatgttcttgaagcctttgaggtaaatgccgctgcaaagtgaatgatcacctctaatttgcacaggttaaacacctggatgtcatgttggggtggttttgtgaagttcccagttttctttcgtgacagtgggttttgcaacaggagctgttgtgtgaggtgggtgatgggactggggtttgccaggcaggctgacctcacatcccagaagacacaggagggagaggtgctgggcgtgacggatgctctagtggtgggaagagggattcctaagggccccttgcccagcctgacaacccctgcggatgagcccaaggacaggctggggcacacaggcctggaacctccagatggacacacacaattcccactatgtcaaggtgtctctgggatgggacagcagggaggcctagccccaggggcctgggatggggggaccaagggagagggagagtgccacagaggacccaagggctaaggggaccagaaaacaagagggggtgaatggctgaaaggaagagaaatgcatgaagatagagggagagaagtgcaaatgcagttcaaagagaagaaggaggaggattaaagagaacctggagacctgggaagataaaattaaatgaaagagtcgggtgtgttggcacatgcctgtgctcccagctactcaggaggctgaggcaggaggatcacttgagcccaggaggtggaggccagactgggcaacagagcaagatctaaaaaaaagaaaaaaggaaaggagaaggtaagagagaaaacaagtaagaagagagtagaagagaaatggtggaggttgcatctggaggagaggaaagagtggaagaaatgggtaaagaggagagagagagagaaggccagcagaaatgaaaggatcctggcagggaaccttttccgaagcctcctggggctgtaggtgcccaggctgatgggatgggccatcccactgctggtggtcctggtggtcaggctggggagaagggtgctcagtggctgtgggtagggatgttggggaggcttcgagggtcagggagacccccaagcgcagcccctggcgctcgggctggagctccagcagtgcctcctcccgcttgctccactcccaccgccagtttcaggaggaaatgctgcagcttaatcagaattatttacaagataatggtccattgtttgcactgagacagatgttgtctgtgggaactttgtgttttatgctcttttccctgctctgccttcactgggtgcagatgggatggaagtaatgtgagttatgactccaaggattggaaacggggagatgctccactcctgcctgggctcggcggggccacagagctgggctggcacctggtaggcaggggtggagaacagccactgtggctgcagggctgtgattaagaaggtcttatttcctagaggggcgggtccgtgccatcgccttgtccgggaagaactctgattaagatgcacttctgtttgttgcgttgagaggtcaccgttgacatctcaaacgagggtgaccatctgctcctctttttgccaaaaggaaagctcaacccctctggggtggggaatgtgtagacccctttccttttttttttttttttaacttatcagagagcttcttcttggtcttctggagtcagttaggaagccaaatctgggcttgtgactgcctgccctgcttcttcaagggtaaggtcagctgagtgaatgacggctccatctacttacccggggagagagcatgttgcagaggaggaaagatggggtgatctggggagacttggcctgctaccggacttgttccgagccttgccccggtgggggcccaccctcctgtgaagcccgcaggtctgccaggccttcagcacttctggaccccagccacttctgcgtaaccagaaaccctctgtcattatcagaacccattttatgaatgaggaaactgaggccaagagatgctagatggcttgcccacagtcttttttctttttctttttaaatttttgtttttatatcattgcatgtggtgaagtttggacttttagtgtacccgtcacctgaatagtgaacgctgtacacaacaggtgatttttaaaccctcaccccctcccacatccccaccttctgtcatctccaatgcctgctgtctgctcttgctgtcattttctactcttccagcgcctcaggttatgaccttcccactccagggggcccctctgagcctcagcttggccagctgaacaccaggagtgaggatagctgttgcagagtcagggaggggaattccctgagacacacacctccaatgccaagcaccgaacctgatagcccatctcacagatgacagcaatcagtgtcatcaaccgcatcacaccagtcctccaagacacagcatttataacgtcaggctgtgaccaccaacaaacagaaaaaaacaaagtaataaaatatcccaggtcacgcttggatgctaaaatcaagcagtcgtggaataaagaaagtcactttcagggcaactatgtaaaatcagtcgtggcctttgggcagcctagaggagaactcagtcagccacggctcctaaccctgccccacaccctgagtgtctatgaggggtcacccagaaatcagttaccaccgggacgttttgttccgttcaaaaaccagccgtgtgggggcatcctgggtctggggcagatgactgtttccccaaaatatctccatgcccaaggaacagctccctttatcccagcagcaggatctggtcctccgaactcacccactaaccttccaagcaaagttgtaaataataaagacttcctctgtggcaagtcctgttctaagctctgtacagatgagagtacaaattagcttcttacatttcatcctcatgaaaacccaaggatgtggatggagtatttattattctcattttaagtatggggaaactgaggcaccgagcagcatcttgtcacacctaagatcactcgcatgtaaacaacggggctgagattcagagctggacagtggaggtccctgggagtggcctctccgggcagtggggggatccctgcctgtggcctctccggacagtggaagtccctgtatgtggcccctctggacagtggaggtccctgtgtgtggcctttccggacagtggaggttcctgggagtggcctctccgggcagtggagggatccctgcctgtggcctctccggacagtggaggtccccacatgtggcctctccgggtagtgggggtccctgcatgtggcctctttgggtagtggaagtccccgggagtggcttgtccaggtagtgagggtccccgcatgtggcctctctgggcagtggagggatccctgcctgtggcctttccatgcagtggaggtccctgtgtgtggcctctctgggtagtggcggtccccgcgtgtggcctctccgggtagtggcggttcctgggagtggcttctctgggcagtggaggtccctgggagtggccactcagctgcctcaccttgcgggtgcttttctgtgcctttaatacacatttgagatgcgtcaaaaataaagaaaccaaccaaaagtacataacaacagccagttcctgccagcccgccaggctcatgtcaggagagaatggggcatttctgagccacgattctgcgatttggcgatcctaacctgagacagggcctggggagcaccgtcttggagcgcgtgggcggggcactgggtagggaccaggtgtttgggttgtgaccagagtggctttgaacctgccacgtgaccctgaggagctctcctcctatcccctcagtgtcctcacctctccataaatgacaaagtcgcagtgataaccctgagtccttccatgtcacagtctgtgaatcagttctttttagggctatatttattcagtcattttccagcctcagggaaaaaaagcaaaaatctgtcatctccctccttcccccgcagcgagagggccccgaggaaacctgacccccaccttgcaattgttccctgaggtccaggtctgagggagcatagagagtgggtggcccagggctccagctgcccctccctgcccccaaccgcgacagcagcggaggtcagaccaggataatatttatcaaccttattctcattgtgccggactctgaccaaaacccggcgtcactggagatcccagattatgtcttttaaggtcccacagagccgcttcacatgtgcccaattacctctgtcaggcagggggaaggaggtctccctcggtgggtgggatctgaacttgagcttccagaggtcgatggctgggatcttaggcctttgaggctgtcactccccgatagccagaccttttctgttaaaactgtttaaattacaaaccagtaataaaaggatcatatgtgtttcccacagaacaggttctttagggctattatgataattaaaaacatatggtgcctgtaccagtctgaaggaaaccgcagatgtacaaattaggtattatataagggttttctgcttttgcccttttagaaacgtcaagctggagaagtttaaagagataaaaatggcaattgtgcagacagtaggtagcattttggttttagaatcattaaatacataaacccaatttggtttttagactttttaggaataaacagctcctgatatgtgaagaaggtgaggaaagtacccagaggttgggagtttccgggggaagaggcatcattttccacctcacgagaccttggataccatgaaatcttttgcattttctatgacattgttctgcacaaagaggagtatatttattaaatattgaattatgttaaaattgaattgatgggagcaaagatgaggatttctttacattaaactttttactttttaaaaggcaaaggtgcaagtattgattagtctagaaatagtcatttgttttaatttaaaatatgcaattgattttgagaaggtgataaatactgctaataaaaaaaaaactcaggaggatttctatgactccctgtcaatggttttccaaggcagacatacagggcaggtccaatctgctgagcttttcattggaaagggacgtcagcctggctggggacactggcaatgcccagccatgctctggggcagccgagatgacaggcccttagttctggcacagtgggaccccggtgatgggggcaaagatttagggctttgtcagtgcatgtctggtgcagaaaagcaactgggctgctctgaaggggaagggatgggcagcaggtcacaggaccatggtcttcaccagccctgcctctcagggcccctgcttttactgctcctcctgaaaataagttgggccctctctgagacaatccacctagaaccaggatggtcttgcctcatcctgcatcttttccttaatgcgatgagctggtagctgcataaggaagttaaatggagaactaaatgatgaatccataggaatcaatgagcagagaggacacaccacatatccagaagcaaagcccctggagtgctcagataaccagaatttttctaagcctagtgtgcaattgttgaaatccctaataatgagtagagatgaattttgttcaactttttttttgtgttgaggtatatatcacgtaataaattttatgataccctggtgaggttagaagaccccatagccattttttgatcatcctagctagaggaaagtctgggctaccctggagatgcatccattctttgaaatgggctctgcagccgtgttcttgggggaggtgtttggtttctctcttcctccattctcctttgccacaccttcttgatggtacaagaggtctgtcatcctcctgtgccctttcctgtgggggctatgatgggacctaccttgccactcagtctctgggttaggtgaggaagccaacctcctcagggagcttgagatggaatcgaagccagataaacgttcttttttttttttttttttttttttttttttgagacagagtttgctctgtcacccagtctggagtgcagtggcatgatctccactcactgcaacttctgcctcctgggttcaagtgattctcttgcctccgcctctgcagtagctgggattgcaggcatgcaccaccacgcctggctaatttttgtattttctagtagagacggggtttcaccatgttggccaggctggtctccaatgcctggcctcaagtgatctacccacctcggcctcctaaagagctgggattacagagccactgtacccggcccagagaagcattcttgaaccctctgtccacaacacagcaaatagccccgggggctgtggatagcagtggttctcagctaggggcaatgttctcccctgggggacacttagcaatgtctggagatattggggaggggagtgcttctggcatccaggggccagagatgctgctaaatgcctacaatgcacaggacagcccctaccacaattatctatccccagatatcagtagcaatagtgccaaggttgagataccttggtgcacagaggggagaaccaggcctctcagtgaaactccgagttggactcatggtgacaaggcaagtggcgtgccctgccatgcagctcacaccacggcatttggcgtgccccctggacaccctccctccacatcctgtcaccttcagacctcaggcgttgatgaaaaactttgtaagaagccgggtgggctggaaggcaggaacttcaagtggagtaacccggcacgttcctcccaactcaaactggcacgtggggtacggagagggtggcaggtgcagaggcagccgggagccagccttttcttctccctgtgagtgatagcaagcccacgttgttattgtgcacgtagatattaccactttaacttttacggaggtaaaataacaccttgtcactcagcataagtaccaatcacaaaatgaattaattgtaataaccgttgtcaacagaacaaaggacttgttgctttcctaagcagatttcagcgccactgagaactatatacaaacgttcccattggacaggctggcggaaaacagtcagaacataattgtatctgtctatctctttactttgtttttaagggtgaaggaattgagttaaaaacctatattttaagcatatcaataaatatacccctttttgtgttggtgaagtctcctcaaaaaacatggagtctctaataaattggccatgaaaatagcgttcgctgctgatagcacctagaagggccagctgtaggggctgcctgttgacttcaagtcatggagggaatatgcccaattactccccaataaaacaccctcttatttctgggagttatcaaaacacatcctctggacaggtggtcagctgccccccagctcctcaaaggaagataagtgggcctcacgcagggcctgtggagtgtctaactggccccacatcgacacaggcaggcttgtttgcagtcagtctctttacagttacattttatcccctttttttttgattctagtttttcatatcttagcacattttcctctttaagaagcactgtgggtactcttctgacaaaagggtcattcctgggagaggtggtcggcttcagtgggctggttcgctcaaaagtctagttcaagctgtgtccccagtagaggtgaggccattctactgggggtctttgaggcttgagaggggccaaaaggcagaggatggcttttgcaggtctgctcgggacttcagtgaaatataaagttgggaatctcccaaagaactccaaggcaagtgtgtctgacacacaggctaagtaggggtcaagatgcccaaagccctcttcagtgaggatcatgagcaatcatgcccccttcattgaacaaagatgtaaaaggcaacctgggaagctttatctgctttcatgccatggcagcaaagcagagaaagtaacttggaagactcagagggatagaacgactctttgcagtccatgcccccttcttggtgctggccctacatgtttctcatttcttccaggcccacttcctgctcctgcttctctgtgacctttggccagtgtgatcccaacatccggcttcctcccacggtctcaggcccctctcaccacaggcatgagtctcccccacagcatctctggtgccttgttagacagcctgctttatttttagggctcattgaggcctacattgggccctccatgatgaaatgaaagaatcttaggctatcagagatagaagtcatcttagaggtcacatttgatagggaggttggagagaggacttgcccttggttgtagaagcagagacaaggggtggtcttgttttcacgcatccaaattgatccctctgagtgctgtcactgtacatccaagcaaggaaggtgtttgtgtggcttgtccctgcagctttggggcatcttttcctgcagaaggactggccacttggaaacatgggtaagaggtgggcatcttggtttaatgcggccctaactgtcatggtagcccatgcctttggatttgtgtagttatctctagctaggaccaggtactacttgcagaaaaagtactgaaagagcccttctctggaaaaggaactctccctactgcttcctgaggctggtgtctgtgtgctgcgtctcacgggaaggcaggcttatccctcgcacattcatgggagaggggtgttcatcacactaaggtcccaggcccccgtcctaagagcagaatgtgaagtgggggcacccaaggggggcagctgtgggatatggagagaggagaggtgggggcagatcttgtgctgtgtggacggccattctggaaacactgtgacccctctaccctccactccctaacctcacctgccatccagcagccttgtcctggggaacgaggaaacagcattctctccaaatttgtcagaaaggagatgattccatcatggggaaggtgcatggttacttgtccatgtactttagcacatgtggcattcttgcacagcgttggcagatggtcgccaacagagtaatcaagatgacatctctcgtggggcttaccttctatggggacactgacaaacaaacaaacaaataagttcggcataggatgagtgatatgaagatgctgaggcaggaggaagagctggaccttcacatgagaaggtcaggattctataccccagagggcagggaaggcctctttgttgaagggggacattggagagagactagagacagtatcacatgtatcacatggatagagagctagagctcatcaggacttttaatggccatatacaacaaattcacctggaaaacgtggcccaacccttagacatgtgagttaagccaccttggagagaggcagatggttgctcagacccacctgcaccagacgcaccagtgtgcagaaatctgaggggggcacatattctaaggagagggtacaggaaagacaaagaccctcagatgagagaggaacagagttttggagggcttttagacctcaggacccagagatccctgtgtaagtgaacaggatttccaaggtttttccagatgttgatatttcatccaagcttctcgagggccctgtgtggtcaacagagctgggacttggggctgtttttcccatttttatagatggggaagctgatgttcaaagagaaaataatgacttgcattagtaatagtttgtggtagtgaaaggcagggctagggccccaggtctcctgactcccaataccaggctcattctgctaccctggaatacttctgcctgttcctgggactctgatgtgtcttttgaggctgaccagttgtacggtaggactactgggcctaggggaggcatcataactcattctttgcacattccccccattcctggtgaaaagaaaggttgaaacttagaagattggtcatagactttggaaacatgatactatgagaaacacagccatcctccaactcccccaagatgaaggtcttttgtcctcacggaccaagactgtccatgacagagtccatggattgaactacacccacccggtttccttttaggtatcacatggatagagagcaggagctcgtcaggacttttgatggccatacacaacaaattcacctggaaaacgtgggccaatccttggacatctgagttaagccaccttggagagaggcagatggttgctcagacctgcctgcaccatgaagtttcactccatgctgaccgtgaccagcaggggttcagcccctcctggacaccttccaacatgatggccatgacagtggtggtgccacccaaggtgcagaggagctattgccaggacgggcagctgtctttccaaaatcccagtttttgtcagggaaaactgctttcaaataaatagctgtttctggatgattctttttagtatttcttctcccagctggctgttatattgtttgcattgcataccattctgggaggcaaaaggtagcccacctttcatactagctgcaatagtatctatttcccaaaattaaaaggtcaaattaggaactatagcagccttaaaatactttatctgctctcaacttgagaagacatgtagaaaggcttcttttgtaccctaaaactatttgtgatgttctccatgcatgggggtgaatttgcaatgggatcagagaaccagggtaagcatgaaagactgggggaagagacccttcaagaaaagaagccaggatcccaggtgggttcctctgcaaagaaaggcccagaggtgcaactcccaagcccactgcctcctgctgctgagctataccttgccttggggaagttggcttgtgggtggcccccattaggtgctcaactgatgctaacggttggtcacaatagcaatgacctctttccctcactgatgcccaaggtccagccaaagacattgggcttgaatagcaagggcaggattcagcagagacaggcgttgccttaaggcctttctggcttccggtcaatccagcattcttcttacaggggagcttgcatgctcacttagcttgaagcccatgtaatcccatgctgtgaagagctcatgccaggccaggccatgtcacagcaacaaaactgaaggtatgcacttcatcatgatcaagtgtatagatctatctgtttgtatactataatatctatgtatttgttataaaataaaactaaaaatacattttttaatcaatgagtttttccctcctgacttctgctaaatcctattcgatttttttttaaaggtgagaggctaaggtctagcgtggcttgaatttagtctagtgcagccatgcatcggaaagtgatggcaggaaggctgtgggctgtagttcgtcatctgggtttgtcagtctacactgggacaggtctacacagcctgtctctgctcatgtagtccttacctccactccttgttgtctgtgcaggggattactgagttgtcaggaaacatggtcaggaggtactctgcagcagaatttatccattcattcattcattcattcattcattcagcaagcaagcattgatggaacatctctcctatgccaggcactcttctcaacattagggcatggaaatgcacaaaaacagccagaagccctagacctgtgaacctgtttctcctttgctatgccccgccgggcacttccctccatggacagcccctccatgggataggactttgttggcatggtatggtcccctactcccaggacctctcagtcagtggtggctggacaccacccctcccatccagagccttgctctgttggcctcctgaagatgatcctgcccgcccaggtggccaccaccatctattgcagcaagaggagcgagactgagggagtagcgacatctgtcttgctcagtcatccagcaaatatttcctgatggttcctgtgcaccagatcctttcctaggtatcagagacccagcggtccagaaaggaggcaaaaactcctccctgccttcaggcagctcacagtctagagggcagtgggcaaatggaataacgggtaggttagatggtgagaaggctatggagagaaataaggcaaaccaggagttagggagtgccgggggtgctgctactttccagaggtggacagagacaaggcctgtgcagtgacacccagggatttgaaggaagccagtgcgttcctcggaggatgtggggcgcacacttgggtgaggccctgaggacagcagcatgtacagttcagagaactttggagagagaatatgtagaagagggggagggacgggtcacagaaatggcctaggccttgtggccacaagagcgactccggcagaggccagcttcatggggtgtgcgccccatgcagtcccttaaggcctacactgagaagggctcggctcatggtataagggtcaagtgtgcccacattggaattcttaatgatgtttgagccaagggtcctgcatttctcttttgcagtgggtcccacagatgccatagtgcctctgaccctggcttttccaccaggcaggaaggaaagcctctgcagagcatgagacgatttggagagagcaggctgctgggcgtgggggacccatgggtgggaaggtaggaggccgggaaggaggctgttgtggtgactgagcccaggatggaggtccttgttccggtgtcagtgacgatgcagataggacactctgttccaagcctgcgtctcccgctctgtctccttcccccatcgttcctccatctccactgctatctcaagccccacctgggtcctccttctccagagccccacccctgtccttgacatcttgggagccccagtttcatggttgaacttcaatcttttccctctgtcttctttattgacttctttctgacctcctggggaattgacagctgtccagaagctgcagataggctgtgctcttctacgctagtggcgctcatgtctgatactgtgggctggacagccaggttctgttcctggtcatggggacccactgccatgcaccatccataccccctgcctcactttcctctgcagcccacagtgtccagtcccaggggactgggtgctcacagtgaggcttgtggagttttcttcctgcaaatccacctggtccacgtggggactggaggctttcttgtcctgggcaatgctttcagcaactcagccgtcttccaaggggaacagtcagacaagaggatccggcctttcctggagttgcatgtctctttagggaggcactctgcaagccggcacatccctgcctcagtttccctggttcacatgctcctcacagttgtactttaaatactcttttgcctggttttatttgtttgggatttgaagtctgttttttgttgttgttgttgttttgtttcttaaacaccttgataggttttgcaaacagcatcttgaaaagtagctttttgatttgaataagaaatgaaagcaaaagccaccaactcttcaacgattatttattgtgcatgtttttttctccttcattttaataccccggctctttaataccaaaatatcacacatagaagaaagctttaaaaaattagatgggggtggagtggcagttgtggtgtaaatttgcttcatggttaaggccttgtatgccaagttttagtctgaattacatatttacagctgagttataaacccccgaaaaacaggatttatcatggaaatagtgacacaacttcagccagcctggtgttcttgggggttggggtaatatactgtgcagagaagtcagttcattagttagttataaacaaaggacagagatagtaaattagagtaggtatttcagcagttttctgtgtatttacgacaccaagatatgcagctgcattttattccttgagatagtatttaagtattgcagatttaaagcgcgtttttagatatggccatggtacatttttagcctgggtcattctagttcttctgtagttttattcgtggtattttcttctttctctgttgctcattagaaaaatgttaaaaatccattttcgtctgattaataataaagctgatcacatgtaacctaattttcattcagtgctgcccctgtctgtggagtcatatacaaagtgacctttgaatcgccagtggactcataaagtacaataagcaccattgtcctgtcaaaaattgaagatgttttacatcattacaaaatttaatgttccatcttttcaaatgcactacttttcaaaggccacattccaattgaagctcattaaaatcagactcaagtttcctgtggtggggatgaagagagtttcgcaggcaatgggaggaaaatgaatcactcttttaaaacagatatggttacatattagttttgaaaggtacagggatgggagagcctctgttgccggcaacagtgcggcttttgtgctgataaatccaataactgcctcctggttctttttacttcacccaccctgtatcctatttacttgcaaataaatcagctctctaaataaaattgttgttttaaagttcagaggtggaatctgaaggggtttctggagagatgctgtaaagtcagcccggcaatttcagattaaagaaaaaaatgttcctctgactcagagacctgatattatagaaacctggtcactagagagggtttcctagttcctggggaaggttggcccgcgaagcgcagtgttttaactaagagccagctcagtcacccactggggatgggccacagtagggaccctggaattctgagcccaggcataatgcctgccttggcaaagcaaacatccacaggtcttcctgttccagttctttttcggttgtcatgctggacatcttggctttttcttggctgcatctgagcacggaatctctggcctggtctctatgtaagtttttctggctggtccttgggttatacgacatgaggaatgagctcttcccatattgggcactgctcatgcaatggaattgtttaggtctagttttttgcagaatactcacgtgcatcttttgagctcttgaaatactggcctcttcaagaaacatctaggttggaaagttgttcactttgcagagcaggaaggacaacttgaggcccgacactgctcaccgtaggcttgacacccagctccacttaccaggccatagggctctcatgggccatttatcaggcattgggatttagtcaaaagagagttatccaggttctgggcaggctcatttgtaccttaggggaccatttcagagtacaagctttggcatccgctggaattgagtttgtggcccagttctactgctggaggctgtgaccttggtcaggctgcttagcttttctgggctccagattcctcatagaaataataatagtatctacctgacataactatataagattacacatgtaaagtctttaaccctgtttctaagacttagttattgatcattaactgtgagttacaggctagttgttcttttacttatagctagaaaatcactatctgtgttctatctttggagtgtaagagagtttagagaggtaaaacaagaagaagaaaatggcttgcacctgatcgaatgactaatgggttttccatgacagctatagcagttagctactgccgtgttacaaacttagtgggtaaaacaacagcaatttatgttttctcacaggtctttgggtcagctgggtgatcctgctgatcctggctaggctcaactgatcttcactggacttcctcatgattcagtaggtggctaggtcagctggaggatggctggtctaggatggctttgactggggttccttagttctgttctgtgtggtctctcatctccagcaggttagcctgggctcgttctcatgatggaggctcttccaagagagcaaatggaaacgcagaggcacttctgcccaattctgcttgcaaagttaccatcaatcatcccaccggccacagtcacatggccacacccagagtcagtgtgggaggaacctagcagagggcatggatgaaggaggcatgagccttgtaggtactaatgcaatcaatctctttctgtccccacatccccaaggggcacattgagttatatggacagtggtgtggcagggtgaatctaatactttagaagatgttttaattccttcagtctcaggacagcactctggtgagatgttccattatgtttttctggtatgctctgaggtctttcctacaaccacctgctttaccaccactgaacccattcttcccacaaggaaaacttcctttcttctttctgctggtagactctttttaagaaagctgtcttgaaagattgtatggcttcttcacaatgtcctagttccaaaggcccatggctgggattgagcagacgcagttgctgagtctgaaagcccctggcctccctctccctgtcaccccttgctggctccctccctcatcttcaaggtcctctcctgctctcttgccctcaggggatccatgttcacccagtggttctggtattggcaatgcacctgagctgccccaatggccaacattgggtccaggccacagagagccccgggctggggaccccttccctgctgtaccctactcggagttctaggtcccccttatgctttctggtttgtgctacagggaagggcccatgctgaagagacctatggtcttgcagcgagtttctcaaatgctcctcctgcccttgatggatgggaaatggtgtctttcaaggcactggcatccagagtctgaccctagtaggtgtgggtgtactcagcacaactgtggtcaggtgcccgagaagccaagattagtgaggcacacctccacatgcaaaagcaggggctctgtctgtggagtggggtacctgtgtgtttctgcgggcatgccagggagggtatgctgtagtggtgctgggagcaagactctcccagcccctcttccaaaggaggctgaggagctgctgtgtctcagccaatggatgctctggcccagacgtcatctaagccctctgggttcaggctcctatgatcctgtgtggagctgcagaaacaatagggtctcgaggaaattccagctcatcctactcttttcttcctcccctttgggcccgtttctcaccagggtctccacagtggtcagagcaactccagctcctggctgcttggaactctccctgctggtgaccccactgacatcctccatggatcagatgggggcagcagagactgtgtccacaggaagtggacagctgtgactgcaggtggccccagcattttccaagacctgtaggagcccatcggtcctcattcgatctggaagtgattttcctagaagaattgggtattagcttctggaattatgagcaggaaaagcttgctttagaaactccaaaatctgatattccatctgaatttagaaaagcagacctgatcaaattcactatgtaagtaaaactacttatttagaaaaagaaataatagtcaactaataagttcaactacttctcctgcctctaaatttatgatggaaagttagagttgctggagacagtggctcccgcctgtaatcccagcactttgagaggcaaggcgggagaatcacttgaggtcaggagtttgagaccagtctggccaacacagtgaaactctttctctactaaaaatacaaaaattagctgggcatggtggtgggcgcctgtagtcccagctactcaggtggctgaggcacaagaatcacttgaacccgggaggtcgaggttgcagtgagctgagattgtgccactgcattccagcctaggcaacagagccagggtccatctcaaaaagaaaagaaaaaaaaagttacagttgcttgtggtggttgaagatttggctttgaggactggaaacagctcttgcaggggacagagagaggccgagatcagctgatggctgtgtcctttcttgggaggactttctggatgtctgtggctggaagcaggacagtaaagaaaaggagtgggccagcgcaatggctcacccctgtaatctcagcactttgggaggccgaggtgggcggatcacgaggtcaggagttcaagaccagcctggccaacatggtgaaaccccatctctactaaaaatactaaaattagccgggcatggtggtgcacctattatcccagctactcgggaagctgaggcaggagaattgcttgaacccaggaggcagaggttgcagtaagctgagatcgtgccactgcactccagcctggtgacagagccagagcgagactcctctgtgtaaaacaaaacaaaaacaaaacaaaacaaaaaagaaggagttatgtccaagagtcaggaagacactgaatgtcgcaggattcccagtggaatcctctgagggaaaaaagagaggtgagggtccgcggtcctgcttccccagaggtgaggcagcttttggccatgttgttggtagcaaagactcactttcagctctggaagctttggctggcagctgggaaaacaatgtaatctggaagttcagggagaccgaggcagtgacacacaatgggcagacgtgcaccaaagggaggaggccgaagctctatagggtgcctactgccaagggagcctgtgggtgtgattctactgctcacacagttgaaaacaattctctacatgctgcagcttccaattctctacacagctgatgtcctggcttctcttcctagtttctcttttttttttttttttttttttttcagacagggtctaattctctcacccaggtgcaaatgaccagtggtgtgatcatagctcatagctcactgcagcctcaaactcctgggctcaagtgatcctcctgcctcagcctcctgagtacctgggactacaggtgcatgccattatgccaggctaatttttttattttttatagagacgatgtattagtctgttctcacactgctgataaagacatacccaagactaggttatttataaagaaaaagaggtttaatggactcacagttctttgtgactggggaggcctcacaatcatggctggtggaaggtgaaaggcacgtcttacatggcagcagacaagagagggaatgacagccaagtggaaagggaaacccctcatagaaccatcagatgtcgtgggacttatttgctaccatgaaaacagtgtgggggaaaccatccccatgattcaatgatctcccactgggtccctcccacaacacgtgggaattatgggagctacaattcaagatgagatttggatggggacacagccaaaccatatcagatgtggtctcactatgttactcagactggtcctgaacccctggccttagggatcctcctaactcagcctcccaaagtcctgggattacaagcatgagacacctgtctggcctctcactagctccttgattgactttaagtaagccccagacctctgtaggcctaaggttcctcatctgtgccatgaggggtagcactaggtagtccccatgggccttatcaacactgacagtcatgagacctgttggaaggagttcctggtctctgagtggtatttctaagaaaagtgtgggagtcacaggaggacagtccctgagcagaacagggccatgctgtgtgatgctgttgaaaggaccctcagcccctttggcctttctccaggctggtggggagatgccccgggtggctccaacagagatctttctgtctggctgcagtgcagggagcaactgttctgagaggcagagaggccattggcaagccagggtgactagcaggcactacactttattgggagaagggcttcctcggcagctggaatgggtgtgcttttggtgtgtgtgtatgtatgggtcctggcctgcagctccacccagatgcttaagaagtgccccacacttgaacacttccttccagaatcaaggctccggatggggctgacccctagcccctgagtgtcagtaggaacagaaagcagtgctttctgtacatggacccttgaaggggctgtagtcctcatgagggcagcaatcaatgcattcctagctactggcacagtgactagcacagagtaggtcctcaagatattgtagaatagtgaatgaagggatgaaataacagacagatggatgaatggatgaacaaatgaatgaagtaaacaactcttcaagcttgacgagctcggctattgatggagacccgagagccgtgattctggccctggtggtcagaaagggttaatagatcttgggagtattagctggacactgagaaagtggttctctcactcagggaaactgcccattggctcagggtgggatgctactgcttggggttaccaagccttttatgcatctagaatcaacagtcagccctggccaaccacaatccctgtgtgttccaagcaacccagtctcatccctgctacttttctcatctccaacgctgcatcttcctatctcccctgatgtccttccctcctgccctcctatccatcattccaggcccatgttaagcctcacatcccccagcaagtctgggctccacctcctgtatcctgctgcaagtggtgagcagcagctggaaggacctcctctcccctgctccttgtgggactcaggcagataacgcctcttagctgtcgtgttatttacactttcaaatcccccagcagcgggaggataagggatcagtggtaagaaagctgttagtgaaggtgctgtgtgtttagtctgggtgtagtggaaagtgtggctcccccgatggccctgcggttacgctttctttccctgcggtgctacagcactcctgattaaataaaagtgtgtgactctctctccacatggatatatatctatgcaaagtacagttcagagaatgtgtgaagaccctggagacacagcccaaaatgccctccagcttctctctgccaatccatgtccagccttcgggattagctctctttttctgttctttaataaagccttccagagcaacacaggtctccctcctccctgattcatcatcatttctcaagtctgcaccttgcagaactttcctctttgtttgtatgttctaatttagccttctgcagcttaggaaattgtcttttctctcagatcaaaactactttagagacagtcttggttgggtgtggtggctcacgcctgcaatccctgcactttgggaggccgaggcaggagaattgcttgaggccaggagttcaagaccagcctaggaaacatagccagaccccctctctacaaaaatacttaaaaattagctgggcatgttggtatgtgcctctagtcccagctacttgggaggctgaggtgggaggattgcttgagcccagcaggcaagtgtctcactctgttgccctggctggaattcagtggccatgattgtgccactgcactccagcctgggcaacagaacttgccactcaaaaaaaaaaagaaaaagaaaaagaagaaaagaagatacagtcttaagcattttgagaaggcccaagaaataggctaagttgattcattttcagcttttcagcaatcttgacgttggtaggaacagaaagtgctttctgtacatggacacttaaagggactgtaatcctcatgagggcagcaaccaatgtatttctaggtcctggcacagtgcctggcacagagtagattctcaaaatattgtagaatactgaatgaagggatgaatagtagatggatggatgaatggatggatgaacagatgaacaaatgaatgaagtaaacaactcttcaagcttgacaagctcggctattgatggagaccctagagccatgactgtggccctggtggtcagaaagggttaatagatcttgggagtattagctgggcactgagaaagtggttctctcatccagggaagctgcccattggctcagggtgggatgccactgcttggggttaccaagccttttatgcatctagaatcaacagccagccccagccaaccataagccttctgtctcaagcagcccagtctcatccctgctatctttctcatctccaactctgcatcttcccatctcccctgatgaccttccctcctgccctcctacccgtcatttcagggctgtgtcaagcctcacgtcccccaacaagcctttcctgttgacactaggtaatacaagtcttctcccacttgatgtccaaggaactttcattgtctgtaccacataacttgatgtctgaaatatcagtatttgtcacactgcagtggaaaggtgtttgagctaatattttcttttatcccagaaacatacactgagctcatacgtatcagtcaatcagacaagatcctctatatacttcctctaatcccccaatcacccctgccctcctggagcttacacttagtctgtttggatcccacctctgccacttaatagctatgtatatttgggcaagttacaagctatttctaagactgagttttatcatccgtaacatctagctgacaacaacttctctgaaacaggttgcccaagtctcgttaatgtgaataccctctgcttatcctggttccgtcgctggatggaagaaattttgatggacaactaggttgcttcattgttctatagaggcaaaaaggggagtggaaatcccataaatgggtcccagcatgcgctggttagtgagaatgtgcggccaccatgttctattgcatgttagtcacgtaagtcctaaggtcaaccttctggagaggaagacaaatgaattcagaatcaggtggacaaatgcatgtaactgaaggagtaactgacataagagcaccttttgaaaatcaactcaaaaagccatggagtttccttccttccttctttttctgccttcctttccccttctggtacttgatataatttccactattgactatcatttttaaaaaggctctcctggccagccaacttctagaggatggtcataagctggtaagcaatgaagcaactgtaccttctggaaattaattacaggttcaacacagcctgctttttgcccacctgtaaaatagtgtgtggatggagagtaccatgagtattgcatagtatttaatatgcagtcttgtagtccaagaaacacttgtcaacattatgtaataatctatgatcaaaaactaaaacttgtcaacttcaagaatcagttgcattctaactctacaactgaaactcatttaaaagtatatgaaaatcatgaggaagagattcaattaaaattaattgaaagtatggaaaaatgatttgcagtgatataaatcagtacttattgcttactttagcttattctataagggactctctaagaacaactaaaaagatttctaaatgtgtaaaggacaaataacatgactctgtccacacatatcttgaagatttaagaggagctatgatacctttttccttctagatcctcaaccagcctttcccatcattgctacttttctggactgagagacatagcagaaatccaattgcaaagatttttctttttatttttttaacttttgagtgtgcatgcaatttcactgatagcaggatctcagcagagaaattaacttcaataatctatggattacaagacatatcaaaccttcaaagcagtccaatgttagatctattctcagaagggtttaaatggctttaatagttaacaacaaatgatagaatgcattttcccaactaaatcaagatcagttggtattactctcccattctccgagccacttaattatggcaagcatggtctccatcacccatggtgaagcccttgaagtgctcatcccccgggggtgcctggttttgcttcctggcctagcagacatggcaggatccaggcaatactgaagggcctggttagactgtcctgggcagcctgctccagcatgccatcactcatacccttcattgtcagtcgaactattgatcttcagcctcctaaactggagacttcattccctgaaaggattaacaaggacatgttttaggtggcagacttctggggaaaagctccatccctggaagactggccatgggagtggtgcttgcagagctaaacgagtcgaggcatgctttatgagagacgagggagaagcccggagcctgcatgcatgcaaaccctttctgacctgcttattccccattaaatttgcagcctgtagcagtgctcagtctgaggtccagaaggttaagttgaagttgcttctgtaattggtgcattaaaaaggcacttctgtttactaacgtcttgcaatcagttggtgcatgcatggccttgccacttgtggcactcttcttcctcttgtgggagtccctctagatctcataggccccagctgcaaagtgcactcagtcttcatcccagagcaacacgtggcttcccagtgagctccctcaggcggcagctgtgctttgaatcacagatgcacctgctgggctggaggtcacattgttaggcgctgatctttactggctcatatggtggtctggggtcattttggcagacagcaccctagcagaaaaagcagagtgttctgtcacctaactgttgagcatcaccacggcagtggcatgccaggtacagccctgagcccagagtctctttagatacatatgtggtcatgactgcattagtaggaattgagggtcctgatcaccatggtcagtgagggggacaaggtcctacctgtttggccccagttgacccctttgaggaggagattggcagactaaggccagccaatggggagaagcaagaggatgggaggtcctgaagcacatgaggtggcagtttccctgtgtgaggggaccactcacacagggagttgcacacaaacatcatgggaaatgcattcctgtttccattttttttctaatttttctgatccaaaccaagaagaaagtatcagtttggtgctgctctgcctttaacacctctccaacatttgctcatcacagtttttaacccagagagagaaggtcttaggcccagaaccttttcaggcaattgcttctagctggtgtttaataacactctcatgttttcattgttttatttgtgtgaatattttctaattatgttgagtactcctgggcttccgtttatggttcagttatagagcttccttttggaataaattttcttaaaaaataaaaaagaattagttatttttttaagtaaggaaataatagtacaggtgacatgcgaatatggcaagcgtcatagaagcattctaaagacaagcatgttttggaaacattgggatgtgaggtgtggccaaaagaatagagctattcagacttggtgaaagggagctggggtgtttctgaatgtgctggagaatccccaagagacctgagaagagggatttagagaaagttagaggacattagattttggttctcaataggaaggaacctcctattaattatcaccttccaaccctagggccatgcttgggagggctctttgcatcggttaccaccatctgtatttgcatctgctctttgtgttggttgcaaccatctgcatggtttccatggaagaaaggctctgcattgcccgaggtccctctgattccaggattctgtgccctagaccctctgttggctcttacaggccatgaaaggcagcgatgttgactcttcctgctggagatagcaacaatagagccacactttggtttaagaggttgcttgaacaatgagaagagggttttcttttcttttgattattttcttttgaagttgaggagtccacccacaaccatgtttttcttgaactgttgttgctgttgaaaccgattacctccttctactggcagccctcaggttatggatgtttgagaatggagtgcaaactgtttatttgggggtgatctcaggaagcacaggtaggggataaagaaatgaagcaaggacaaaaagcaaagcaaaaagaagggtgtgttaccaagctggtcaccatagtgagcagcactgggggacaaggtagagctgggcttagagtccacccagtggagcagcaaggaagctggggtgttcattcttcaactctgtatccatcattgatggagggttgcttgtagtggaattaaccctctggcacttccagcctgccctgtgtgcagcctgagtgtattttcatcactagaaaaatgtctgcagacagaaattcccaggggttccctctatgcagactttggtgtctaggggtgccatgtggagggggatatgagcatgacacttctagcatctatccccagaggatcatctttaaagatagtaaaatgttgattatatttagaaccagcccactgggctccatccagatgatcctcttttgttctggtgactcacaaagtgtgatggctggagagagctgggcctgtgcctccttctctccagcaggcctgggcggtgttgatgttggccatgtcaacccatggaggttcttcatgggctctgatctggtgagtgtgagccttgaccccctcagtggagggatacttggtgggcgtccttctggcatccatcaatgttggacatggaattgaagaataaacacccaagtgctgttgtcctcacattctggctgacttgtggtgaggggtagcttggcagctgccttatggtcaagcttgttcctcctggggcctctcttcctagggcacttgggccctggtgtcttgggcaaaggagagtgggtgacatgcacattttctgtggcttccaatgcctttcagcaaggctttcttggccttcaaagcctttgtctttcctttgtttggggaaagcaagagcttctttctttgtgtttcaccctgtctctgtaaaaaggtcctatggattttaacctcttttttctctgtgtgtgctatgagcttgcatcacagcctgcagcccacttgcagagctggaagtaagcacccattgtttcagttccaggaggagtggagatgtggggcagaagactggagtccaggtctcactgtactgtgacctcacagagcccctttcagtctctggggccagttcctccagctgcagagtgagaggcttggacttgattgcttcagaggatgcttccagttctggtgtttgttttctgtggttcccatttataaaacaaagcctcttagatgtccagctgttgaagggaaggccagtccttgggaaggatggttgctaaccttcccaggtggcaagaaactggcaaggggcaaagggcacctgcagaaaggagaagaccaaggacttctggtgtggcctgaatcacactggcctgtgcatggcccagatgtgtatggttgggagagcccagcacagctggcctgcttcccagactgttggatcaatgtcaacagacaactgataattcaaagggatgatgaagacaaatgccacccactcatttggtggaagagaattcagaccagaagtagatactagcagaggaaaagtggccatttttcttatatagcaatggttatgtttgagatgtcagggcagggatccgagggtgtccttactgttcacacttgtgcaggactgccactgccttctctcccaggctgtttgtattagtctgttctcatgctgctaataaagacatacccaagactgggtaatttataaaggcaagaggtttaatggactcacagttctacatggctggggaggcctcacaatcatggcagaaggcaaaggagaagcaaaggcatgtcttccatggcggcaggtgagagagcttgtgcaggggaactcctgttcataaaatcatcagatcttgtgagatttattcactaccatgagaacagtatgggggaaattgcccccacgattcaattatctccacctggccctgctcttgacatgaggggattattacaattcaaggtgagatttgggtggggacacagccaaatcctatcactgttccttggccaccccattccactgtttcacagtgtcctttctctctgagtcacagccagctttgatgggttgctggagcagtttgaggaaagaaaatagtttgtgttggactttcaattgccaactataattttattgaaggacaagagaaacacatcccttggagaggggcaccacccttcagaattccttttcaactctacgaaggtggccttggaaaactttctcagtgcagtttggaaagcttagtactcacatactgactaggtatggatatgtttctcctgcactttggaaatcttttgaatatttataaatttaagtatttattttcatattaaaattaaaggtctattgtcttgcaactaacctgccttgttctgccactccaaaacaaaaccttctctagtgtgataacctttatttatagatggcaacaagcatatttagcaatattattattcatgacccttgcactaaatatcataatcagaatacagatgtgcagagtaatttccatgcacaagtcactatgcatcaaattcttgcaaagcaaaaatagcatccattttgggataaattatccattggtgttgtataaaggtatcgaggcagcacaaagggtttcaagtagtaggatatggagagactgtttaaattaaggggtacccaacaccccaggaatgcagtgggattttttttccatttttccccttccggcaacttatttgatcaccttcttttgttagacccatttttaggatgtggaaagaaaatgggtcaggcatgtgggtgtctggatacaaagtgtggctggatgaaccaaggcctcctttgctctaaaccccatctctgaatattttctttatttttgtcaagctaaagatgcagattatcagataagcagcacacccgggctcagctcactaattgactgaacaagacgtggtcacagtttatacaccattccataatggattttcatgtttgtgaatcctaactggctgtggaaatgaaaagcaaatgtctcataatcacaaatatcttctgggtttttttttttttctaagcccaaagattaaatcaactttaccccccatttgccagcaagttcacggttatagaaggaagataaatgatcgggtgatggacatatccgctgtgctactgtttagcaaattcttgtaagtgattgctagatatagcgcatttctcacttaggtgttacatgaataattggtatattaaagaaagtgtgaaataaacaggtataacgcttgaaatgtgtttattattttctgaggtttttcacattcataccatttagaagccatcatcaagtccagcatcttctcccatatacctggagccgaacccttcattagacctgttgtaaaaagatcctttcgtgcaaacgctgtcaggtatttataatgaaagtgtggcagatcagagaggagaggctgtgtgaaaaccatcaaactggtcagaaatacccacaactggaggcctacctcgctccggcctctttctcgctgctctcttccatctcgcagctcctcctggttttctgcttgtcagtatcagatgcaatttcaggccaaccccagcttccttgcgctgtgaccaaaaccctttgtgggcagtgggtctctgagcagtgagggaggaacctcatgaggctgacttcagggtcttcactaagaggccatccactgtgctggggataaattgcccgatttttcagagaggaagagatttggggcaggttctccaaaccttctggctagctcttgtgaattcagcagcagacaggccacacccagccagcagccctcaggcctggctcttatgaatgacttctactttctgaaatggagcatttcctaaaaaggtaggcaggcccagcacacccggctgtgactctttggcaaagcaaaactcttctagtctttggcgaggcagccttggctctgaccccacctggcaagagtccgcgggcaacagagttttgctgtctttgtttctccctctcctccctgcccctcacccacccccttggaaatttaggactctaagaacagagaaaagctatcaggacaagggctggtcattcacccaactgacagagacctccaaggtatcaaggctatctccttggccttgagagctggggtctgccagcctggctggtcttcaggcactttggagaggatgagatggctagattgctagatggagtggacttttcaaagtagagccttgtagacactgagaagaagaggaaaaaagagtctagacttaaagatctcattgattgtccttggagacaagccagcctcagagtctgtcccatgtccccttttcttagtctcatcctctctatgccacgtggaatgtcttccatggggctaccaagagctgcactgcatatataatatcaaacaccaaagttcaatgagtgatccagggacctttctctgcattccccagaagcacaatcaataggcgttcaatcctggagtgcgcagagtcacttgccctggacctcatcttacgtatagctgtcaccatgcccaggaacaggaaatgcctatttgacccagcatctgtccatacacggccagcagccaggttctccttgtgcacctctgtgtactttctgagggcatgtgcagaaaggcaggggccaggccacagggcctgtcccaggctggtttccagggctgctttctaggctggggaccctgggagtcaggccacaggtcctcccctcttctttccctcctcagtctccccctgctccccgtgtgaaagtggtgacctgcctgccgcctttctccctacctccctccagcactagctgctgccttttttgcataactggtaacaaattgcttgactcaccacatgacattgactatgatggattaaatagctgccttgaccagatcattaggcgctcgtctgcaggacacccccgtggagcctgctggagagaggcagggggcacaccagggcaccccctgggtgaggggtcctgctcccctccctggctgcagctagccggcctgtgctgcctcctccctccccactcttctcctgtttcccctgcgagaagccgctgcttggatcctgcattccatttagtgacagccgaggccaacgtctgagccacgctggcacagaggagcagtgcaggaggaccgggtgtggatgtaaggtgtgggattcgaggcaccccctctcctggaaacctctgtcccccagctgccccgaaggccaacccaggggagccatgcctgtgtgctcagtgctgccctggcagcactgagttcttccaggaggaggctcttctgcatcctgcttgggcaggagggacccaaggtgcaggtggctgcagtgggcaccgcacagaggtaggtctcaaagtgtggccaaggaagccagagccaggagaggcacaatgaagttgggccagccaggccagagtagttcagctagtctgaattccaggcctggccctctgctttcactgtgattggagaccttcgtttccccatgtggagctcaggggttggccattgccttattaccctccctccatcacttgggagctggcaacagtggtgaaaatcacggttcttttttttaattattttttaagagatagagtctctctctcttgcccagactggagtacagtgttgacatcatagttcactgcagccttgatctcctcagttcaagctgtcttctggcctcagcctcccgagtagctggcattacaggcttatgaccccatgcctggctattttttaatttttttgtagatatggggtctctctatgttgcccaggctggtctcaaactcctggccttaagcaatcctcccaccttggcctcccaaagcactgggattacagtggtgagccaccatgcctggccagaactcaatgttcttgaactgtggttatttgtacctcgaactgctctcccacccaaaccaccacctgctttctccaagcagtttttgtggatagaatcttctctctggctctttcaagaccccaactctgtaggggaccattgacttgcatagttctagttgggtgggcccagggcctttccctgacttcctggagtgtggagacctgtctgcctcaagagttgaagtctctgaaacaagcctttctagtgtcaggacataagaggcagggaaaggggaaagcaagcatgagagtcccaggggaggaagagggacaactcctgggaaaggagagggggtgcagtggggagcagggtgaagacagggcagccccacttctataggacccagagaagcccccatggacccctcactttaaggctccaagagcatccaaaagggtttgttctttgctttctgtgaccatgggctaattcccaccagggccaaagcaaagatcgtctgcgggacatactgttctttcttcttatagacctaatgtggcagagctattttgggcaacaattaaataaaagccaatttgactaaaaagcaaaatatattccactgaatgacagcaaaagggcagagcttggaaagggaaaggagaaaaaaaaatacagagagagagggagaggggaaaaaaaaagaaaatgcaaggcattcatttttcctttgtattttttaataaaagaacgtctctggctgcttaaagtgacacattaaaagatgtatgtatcgtggcttttaaaaacacaattagataacaccttgtcaaatacttatattctttgttgacagccttgagcacagtgacaatcgcggcacagccattggggcaggtgtctcccctgacacgccagcagcggagtcagccattttacagaaatgttactgtttaccactttaatcatcaatccacatctagtcacaacaataagtcagaaggagcagtaaattatacttgttcagccctgatgagtttgaactgttttgctgaaattaactgaagtaattatctatttttctaaagctgcaaaaagggaaaaaaaaaagtagtaatgttccatggggataaagaatctttgcaaagtagtcggccgtgcaatatttaaggaaactttttttgcgagtgtgtgtgtgtgtgggaggggggttctgatgaccacataggttagatgaggctgtgagatgaggcagatttcatctgctgcaatctctttttttagctaaaaaaaaaaaaagtccttcctgcgaaaggaggctctcttattactggactagcttctctctccacctgatctgaccttttcggggagcccatcgctttctggggctgttttcttttgcaatgctaatagcgaattcccaggttctgaggctttctggcttcctgtgatgttaagtaaaagaggagggaacctttcaattgttacttaatcccttaaatgtgctaggctgaccagtctaggcatttagtcttgaaagatctctgtccctgggaaagatccctgcaccagtgcgcaagcatgcatgcccagttctcaggttcccccaacttctgtgggatggtccccctaggaccctgactgagtcgctgctatttaggtctagtctaaatatatatatataggtctactctcctcaagtttacaacaggacacacagggcatttgtctacttgtgcaatagaatgccacgtgcttggcaaacagacagatggcctgacccgggccatcatgggcatccccctctagaaaacacggccaatagcacccacctggcagggttagcccgagaagtgaatgggcttctatgggctgatgggagtgcaggacatcacagaagtcagcctataggtgatgctctgtaaatctcagtctactgtgcctttggctacacacgaaggcatagtagggttataattaagagcacaatctgaaacctggctcttctgctttgtagctgtgtgatctccagcaatttgcttgctgtcttggtttctaaattagggataatagttactcatgagtgcaaagcaacctctatgtaaaatacacagtaagcgctcagtaatatagctactgtcagtattattgtatgtatatggttgctattgtggtatgcatagttttgttgttgttttatgcatattgtatgcatatttttgttgttgtatgcatatagttgttactattgttgcatgcatttgttattattgtcgtatgcatgttgttattgatatgtgtattgttgttgtgtatacattattttgacattgttgttgtatgcatatagttattgttgtatgcatatagttattgttgtatgcatgttattgttgcatgcatgttgttattattgctatgtgtgttgttgttgtatatacattgttgttgatggtgttgttgtatgcacatgtacacagtacttagagcaacagacacagagtaggcatgcatcgtgaatccagctgctgaaatatcccgccagcttcttgacttgaagaataaaggagggccctgagccgtgtcctcctggtcttgcttctggttgtcctatcttccagcaactcagcaatagagcaggagaaacttcaaagcaccttccagctctatcatctgtgagagtagcctccccaggcaacccaacttagctacagaagctgcagttttgctgtaacatgcccttgtcttccctaacttacctttacagaaggaaggcttggtaccaagtctgcatctagggagagtctctgcagagacctgggtgcccacgaaatcccctccactctgagccacataaataattttgaaagcgcctctataaagccacaccaaatatatatcattgtctagattattcaaaaacctagggactccactttcttcttaattttctgtgtaattaagacaaaattaaagcaaaacaaatggcgaggtgtgggggagggagaatgaagcataattatccactccatctatctagacaactcctatccacagaaaaattgttcactctaccatgttttgatctggataaacatggtgattttaccccatggaacattattttctatgattcattgtgaaaaaccaacaggctctaatctgaagttctaactaaaaaaatactatagtttatatttaaatttggggatagcagtggtttgtttccttagtttactagtcaatttcttgggaaaaatttcttctctcttttcttttcttccttcccttcttcctcactattttttcctccttcccttgtgtgcctgcctctctcactccttcttccctttctccctccctccctccctttcttccttccttcctccttccctccttccctccctcccttccttcctcccttcctccttccctcttccttcctccctccctccctcccttccttccctctttccccatctctcctccctccctccctgtttcctctttccctcctctctctctcctttcctccctccctccctctctcccttcctcttctctctctcctccctccctcacccttccctctttccctcctctctgtctcgtttcctctctcccttcctccctcccttcttcctccctccccctccctccacccctcccccatctcctttcctccctttcccccatccttgtctctctcctttcctacctcccttcatttctttttccttcctcctttccttctttccttcctccctccctgatccctccttccctcccttcctcctcccatcttttgtccctcctttcctcccttccttcttcctcttttcctcccccgtccctcccttccccctccctccttccttccctccctccctccctccttccttccttccctccttccttccttccctccttcctttctaccttccttccctcccccagcccttgtctattcattcgcatatccactcagcaaaccttctccattgagcctggcctgtgtgaccttgaaatgggctgacccagctcagacttgtgtcactggcctccctttacaagacaaggcagagactgcagatacttttctaaccgtataaaaagtgagagttacaagtgcagcaatgaatgcggaaaacaatggcagacagtcgaggacctgatgaggttctgtacatttcacaaagcacatttgtctaggttttccctggcaaccttgaggcatcttgccctattcatggaccgtcttgtggcctcacaggattttcatcttttgattttctgaaaagctgtagagtcccctccaaaattaagtgacaaatctccaatctgagtttgattcttggctgtagattgggtgtgtcgtgtttatgatacaacaatttccacggagtgtcactgggggaaaaagtggtgattctgggtctatattctactctcaaatgctcctagctgtttttttttttttgttgttgttgttgttttttgtttttgtttttgtttttacttttttattcttggagacagagtttctctcgtctgttgcccaggctggactgcattggcttgatttcagctcattgcaatctccaccttccaagtgtaagcgatccttctgccttagcctccctagtagctgagattacaggcatgccccaccatgcttggctattttttgtatttttagtagagacggggtttcaccatgttggccaggctggtcttggaacttctgacctcaagcaatccatgcacctggggctcccaaagtgctgagattacaggcgtgagccaccgcacctggccggctgtttattaatcttaatttttaaaagctacaaccaaaacatgatcttaggtgctactcaaggccagagctaaggagacagggcccccacaggctgaccgtttcatgaatgtatctatatggttccagggttccaggcacttcctcacatccacgtcctagtgtgtcctccctcatgtattgaacacacacctgccatgcatttgagggaggaagagcatggggcatattgtaggtcagcaaactggcgccccggaggaggacatagcctggccagcacccctggtgagctgaggcagtgggtcccttccaacagtggtgcaaacgttcaggcgtgtgtgccccattctgtgatgtgtatgcaagtagctggtaacagactggagcatagcatcagccctttgcagagacctcctcagaaagctcaggcatcaggggctttggctttaagcatttctgccaagcatcgagtgtgggcctcttgagaagagttcttttgttccgttgattcctggaaaagtgaacgcttgttttattcgttgtttttgttgttaattgagcaactactttctgatttttactgatggagttggttagagaaagactttgggtaaaaggtctaaactctcacttccaggccagattgaggttagtgctaagccagaagtgggctcctccccatattccctgtgttcccacagtgaggacgctgaaatctaaattgtgaactctgggagccggaagataccagagagttcacttaaaaggaaacttttatttgacatatggggaaactgaggactagacagctaaagtgatttacctatgaccatattctccattatcccagcagatttttccccacatttctacaagtcccaggcagcaatctgggtgctgggactccagcagtgaacatacaaaaccacggctctctgggagcctgcatcggggtcacattctagaaagtccgtgttcgtgagtcacgtgggcagcagattcatggcaggattaggaccctcattcttagcctgtgggacacagcccctgatgggggagcctgtctgaggtctctgggctacgctaggagggcccacatatggcttcagggactgcaggaaacccctaaattgcatgtaacacttgaatatgggcatctctgccatcagaaggaacctatagatgccatcagctcctcagatgggcccctgactcccacaggtgcttagaaacacttcctggggcccatctctgagaaacacaaagcaaggtgggcagctcgttctcagacctagcagcaagaggcataattatggggaaccagccgagaagcctgctgtcaagacagtttcctgggcaagggtctgggacgggtatgtcctgctgaaggcaacgtggctctcccaagccctgcagtttgcttgtgtgatgctgaagggtgtggtggcaccgtggctaggatggggtattagcaggaccctgagacactcagaaaccccattctagaacttgctagccagggtgagaactgtgtttcatgcctttgccatgtggctcaagggcattgaaaacgtcctctccccacagtcattgggaagcaaggtccactcattcccaacttgcctccaggcaggagattcaagctgtgcacactgcaaacttctgctgaaaagcttcagtccacccattagcgttatctgcagtggtatcaaaaaacgaattagggtgcacaatgaagtattgggttctcactttgatgcaatgatgaggaataggaaggcaggtggatattcacatctgctcatgtgatggaacatctgctcattggctgcctggattcacatccaggtgagtatccacatcctcattggatgtctggattccttctttcttctttcaacaaggctttatggagtatctgctctacgccagcctctggtgaagctggtggagattatatgggaaaaaaggcagatgaagttgctacttttgtgcagctcccattcttgtgggctctgtgctgcgtggatacaaccccaatacatttatttttattttgagctacatttggaggccttgacaaacagcttcccaatggatacccaaaagtcataactggatgggtaatattgttattctctccaagaggttagcctgcttgtgtaaagaagtcagtgatgccgaaagctcaggtcccatggcctggtcctgctaagaccacgtgtgcatattttcatcttgctggaattttggggccagatccaggctaccgattccgagaagttccagggttcaaggagcaacagatgcagggtttgtgctagctcagtctcagattgggaggatcccaggtgccagtatcctgtcaattctgtgcaaaggcggagaggtgttttctgcatggaatctggctgctgtgacctgggattcagggagcaagcggctggctgggtactcttgagagaccttaatcctgcctttgaaaagctgcttaaaaataatactactaaataaatctttacagtggatggaacaagctagacttcggtacccatcccccagacaaacaaggagagattagacgccagagtgagagaaggtattagttgcccatcagtggcatcagtctgtgaggtgtgtccaggtgggtcctcctcctccagcccgtgtgacgttctaccttgtgctttgcagcacaggaaggcagaatcataatcacacaggcatctggggctaatacatatattcaacgtctgccaagtactctagactggaggcctcaggagtataagaactgtatctgctttggtcatccccgaatcccccaggtctggcacagtgcctgaaacagagtagaggccttaagagacacatggtgaggaaaacaaaggaaagaaagaatggatggatggatggatggatggacaaatagcagtattttgtgattataaggattatcaaaacttctggtacctggcttatattttccaagccatagatccgatggagatagcacagatgtctcacaacttttcaaatctctttaaacgaacaaatagaagccacttgtttacctgtaaaaaatagtgtggagtctgtttctgtttcaaactaggtgaagggaatcttggtattcattttattgctactattatcttattgaacactatggatattattgtgcatatgattaaacatataatttaaaaattaattttagaaaggaaaacaaggagggggcaccaatcttgcatactgtgatgggaataaaaatgagtaagttatttgcaaagggtgatttcataaaacaatgtggtacacagtaaagtctctttaaaaaaagcacatgtgatttgaagcatcaactttgtttctagaaattaatactaagcaaataattaaatatgtgcacaggccaggcacggtggctcatgcctgtaatcccagcactttgggaggcctaggggggtggatcacctgagatcaggagttcgagaccagcctggccaacatggtgaaacccagtctctactaaaaatacaaaaattagccaggcgtggtggcacacatttataatcccagctactctgaagactgaggcaggagaatcgcttgaacctgggaggccgaggctgcagtgagccgagattgcaccattgcactccagcctgggaggcagagcaagactccatcttaatttaaaaaaaaagtgtgcacagggtaaaccacaaggatgctcatcacagtgtggtatgcaatagtagaagactggaaacagcctggacagggatagtgatgtactgaatgactggtaagatgctaaaacaataaaatacatttctgtgaatacacatggatggctgccagtaatatgttattaagcttttttttaagttacagaaaatataaatatagtaaaatttatttttgtaaaaatattcacatttataagatttatttattcatggaaacattttgaagtctatattccaagtctatctatatatttgcatattattttatacttttataatgagtgtttattatgtttataatatgttttcattttggaaaatataaaataaaatcacagtgtagccttaacaagaaagctgttgagctttatgtcaggagtttttgtggagtgctattagcttcacaggataactggtttttttctttatgatcagaggcactaactggtcaccacaaaggcctttgatgagttagcatgagaaaagtaatcagttattacctaatagatgctttttcttggtcaataaaacttgtcaacaaattgagtttgtgggtcttgggaaatgatttaaaagcagccagccactaaagtaattaagccaacactcttatttttcacatgaagaacggacattcagagagggcgagtgactggcctgaggttgcacagcaagctcggggcagagtcaggaagccctggccctgaaatcttcgtgcatgaatgactctgcatgatggggcttctggagaagggacagcaggaaggcagccagagtccttccagcgacagcaggttttgcaggcacaagtccacgtagcttgcactacaaagcagatcacactgctggaaccttgtattcattaccttatttaatcctcacagtctctctgttgggtaaggggtctcattatccccattttacagatgggaaaactcagtctccgctggaggaactcattctacatgttcctgccattgatgctgtaggaaggtaatagtggatggtgcgaaatgctttttttgtttgttttcttttgttttaaatttccatagttttggggggtgcagatggtttttggttacagggataagttctttagtggtgatttctgagattctagtgcacccatcacccaagcagagtaccccatacccaatgtgtagtcttttacccctgaccccctccaaacctcccccaccgccaagtccccaacattcattatatcactcttatgcctttgcatcctcattacttagctcccacttctaactgagaacatacagtatttggttttccattcctgagtgacttcacttgaaatgatggcctctagctccatccaaattgctgcaaaacacattgtttcattccttttcatagcagagtagtattccatggcacatatatactgtattttcgttatccactcattggttgatgggcacttaggttggttccatatctttgcaactttgaattgtgcttcaataagcccacatgtgtgtgggtgtctttcatataatgactttttttcctctgggtagatacccaggagtgggattcctggatcgaatggtggatctccttttagttctttaaggaagctgcaggatgttttttgacatcactgtatcttgcagacaggcagggactatcaccagctcacagtccatgtacttccatcacacagattcccatcttccttctatgaccctggcttcagataggagccgtgctgcttcaggttttgagggagtcaaattgctacttaggacagaaagactttggccatttgaaaagcctggagttagaggtgggaggccaagaatccaggtagccagtcttctgtgagatactgagctgaggccatgtccaggtcaccagcaaattgaaagagcagatgttcctggaaaactgcttgagcctaggagttcaaggctgcactgagccatgattgtgccactgcactccaggctgggtgacaaagtgagacctcatctctaaaaataaaataaaataaataaaataaaataaaataaaataataaaataaaataaaataaaatataaaataaaataataaaataaaataaaataaaataaataaaataaaataaaataaaataaaataaaataaaataaataaaataaaataaaataaaataaaaataaaagtgcctgcaaggacacacacacctcttaaggctttgaaagggacctcctcctatttttagatgctacatgctttcagctgtcacgggcaacccataacctctggtcttcatggtgggatgcagtgagttgggggtttcccagatggagtgcagatttagttctgagggcgtgggttggtgctgagccacctgaagtaagcagggcatgtttattccaccgttgggaggccacttcaccagtctttagtcaagaccctgaaggtgtttggttgtcccctttcttaggtgaccacagttccatcatgaattggtaggtaacactttgtgaaggaaacagagaagaatggtcctgagtgtgaattgagttgactcccaggcacaaacgggagggtggctagagtctgggctctgcagacccatcctgtggatttcaatccagcaggggccctgtccagctgtgatcctgagaacgttgcagctcagcttcctcctgtacgtaaagagggctacatcatgacctccatcaaagaagtggctgcataggaagagggttcttgtcaatcctcgaatcatggaacactgggggcagctattggtggaggccccagcaggagaaaggtggagtggagaagggaggggaaagggaggatgtcagaatgtgtgtgaaggctggctctcacgaccccaggccatgccattgtaccaacctggctatctctgcacaatgcagacagcccctggctaaactgtgttctttatctgcaaactgagcagcttggatcaaatgatcccctcacctccctaaacctcttcgacgtagatttttgtcaaacttatttacaaaagatcctacacaataccatcatactttctacaccttgtttatggctgagtgtggctgtaacttgctttcaaatgtttttttaaaaattcatgtgaaacttttttttgttttagagttttttactggtgtaaaatgaggctttctattgacattttgtgatggggatatttttattattattctcattgttaattttaattacgctcttctttgttcatcaatagctttctttcatgtcccctccttaattcattatattttaaaaagtagccgggcacagtgtctcatgcctataattccagcactttgggaggctcaggtgggcagatcacctgaggtcaggagtttgaaaccaacctggccaacatggtgaaaccctgtctctactaaaaatacagaaaaattagctggacgtggtggtgcacacctgtaatcacagctactcgggaggctgaggcaggagaatcacttgaacctgggaggcagaggctgcagtgagctgagatcatgccactgcactccagcctgggtgacatgtctcaaaaaaaaaaaaaaaagtaacatactttcagaaaaaagtccctatgcatatgtgtgtaacatattagaaatatatatgtatatgcattactttatagtcctattatttttgaaaatgtgatcatataatgatcatacaataggtattttctgcactttgctttttttcacttaaacagaatgaggcagatgtagaagtattgactttagtctccagttatattgttaccaggtgcatagtattctattagaccatgtacaataaattatttaacctacctggtattgatgcttacccatacaggatatgatattgttgtgagattttgttatttcatgcaaaacttcaccaaatatcttttgcgtatttgtgcaattgtatttatacaataaattcattgaagagaaattgcaattgattttttgaatggatttgtttggaacaagatttacaaaattctaaatggtatgacaagcacagaagtaaactttttcaagtatcagaccagaatgaatcttgaaaccttcaggagatcactgtgggcagaagaaatggatttctactctgcatcgtggtcctttgtccctattcacctcatcacaggaagtatttacctagggtcatttttttttgcaggtaaacacttcttgggataataagcaggtgaatgtttttcatgggcatctgcagatgtgagacccgggagacttgtgtagggtgatatgatgcataccaaaatgagagctttctggacacgaatccaccagaactttagcctggactggccagggctaatcctacctgaaggttttatgaggtgccagctctttacccagctgtaggctacctgattccagtctgggacctagaatgagccatattggttgatggctatagaagacactggtgtagtgcacagtcaggctgggtgaggttcctggctctaaggaactgggccccagcagcttggagatctagagtctcgatcacatagttcttgttgtgtgtttccaaggggcccagcactgatcatcagggtgaacttatgttgtggaaatctcctgtgattcttgctaaggaagatataggactttcactctccctctgaacattgtgaccagcttccttggtgcctaaggagtgggcatgggaatcagaatgttgccttggagcttggaccagattaaaactctagtgcagtcccttgggagatgtgttgactctcatctcgaagccaggagtcagccacggaagtggagaagtccaggtgacaaaagggcccatacgtgtctctctcatcttggcttgttcactacaacatggtaactgcttgctgaattcgatggataggaacagctagcaaagtgattgcttctagactatcattgcattttctacttttctattcaattgctctccatgtacatagtgcaatcccttgccccatctcagcttctagagagaattaagaatgctcacaaatattaaaagaagacttgtttgaaccccaggaggaagattacattttggaatctgagccttctatcagtcaatagaaaaatggaaacagggtcaaatatatgattcagggaaacccacaaaatagctcttgtctagaatcacctctggacactttctatacaatttctaattacttttttgaggttagttataaggaacttcaaatgtatttttgtagagctaaattctacccctgactctgcttctcaagcactgaatgactggccttaacatctttgaagttctgtttttgcagctggcaaatgaaataatttttgccatggctctgacatagctattgtgagggcccaagaagatgtggtaaagaaaagtgttttcttagctgtaaagttttgaaataattaagaggttaatggcagtggcctgtaatgaagcttgtatagttaggttggccatcagtgttgttcaaatgtacactatcaaacaactccgtgcttcaagacatttgtttattcatttattcatccatccatccatccacccatccatccacccatccacctatccatccacccatctacccatccatccatccatccatccatccatccatccatttacctacccatccacccatgtatccatccatccacccatccgtccatccatccacccatttatccatccatccatccacccatttatccatccatccatccatccatccatccatccatccatccatccatgcatccatccatccatccacttatccatccattcattcaaccatccacccacccatctatccattcatccatccatccatccatgcattcagccatccatccactcatccatccatgtcacagatatttattgagaatctactacatgctaggcactgtggaaagacaaaagcacatccccagccctcagaaacttctttctagtggaagtaacaagcaaggatagtggatgttacaatgccttacaacacattttctcattttttaatgataaaaatgtttctagtttccttagatctaaaacatggacctaaatgataaatgccttttgtgtggtgttgggacaggatagggtgtgacggcaaccatatttccatctggcagggcagttccaagaggctgggagagctgatacttcttcacatggcaggctgggctggcacatttggggattacttcagatcccccttggtggccagtccttgtgggggtctccccctctgggtgggggaggctaagtctgtggatggctgctccatcagcaggtgctattttaggactccccattgggctgatcctggggtgaggtattcccattcaatttctgtttgaatcagaaacagagtggaagcttagccgtcaaaagaggaagaaatggatcttcatgtcatctcaaacttttaagacaaactcagtttctaggcttacattcctagaacataccttctccactggccacccattttgttttcttttaaatgtttccctctgaaccaaggacagccctgtcacccgactgtcattgctgcagagtgtgtgtgtggaggcgggtgggggggatgaggactcagacatgcaaggccacacccagagagagctgcttctagccatgagaaggaatagcatgcccatgttcatgcattcttcagaaatttatcaaaatgtagcctctaccaaatggagcattgtttcttgaagaagctctgttatttaccttcacagtacctgccaaactcgaagagcttggaggcaatcattcgctcagttgtggcatttttgttgagggcttaccatgtgcttccaagtctgggcttccctgccattttgtgtgtagacaacttgtggaaaataggaaggtcgttgttaggatagggttaggagagggggagaccagaagaacccggagccattgggagtccttccaaaccctctgggggtagaataagtgacctgttcatttgacattgcagggcatctatcctccaagatgatgggaagcaggaaggagtctcctctcttcccatccctgtacacccatgccactgtcattaaggcagtggcaacatatgtggccacagctgaaatctcaagtgagggggagccctgaagtgggggacctcaaagccactcagtttgcaaacaggcatcccagaaaagctgcccttggacccctcttatactccttattatattgcattaaaaccccctgctctgttccattgataaagacagaaataaaaggtgttcttcctaatatgcagtcatatgaaccatatttgttcacttaccacataatccttaattacttccatacttttatgtataaagagctttgactgcatttctgaatatgtagtaaactgggtaaaccagaagtcattcctctctctaaatttgggcaatctgggtagggaaggtttagctttagggttggtgacatggcgcgtactatttctgcataaatttccttggagtcattgatccactgagtgtcaaacaaaatgtgatacccacaaaattcatgtatgaccctgacatttttccagtacttaaagtaattgcccttctgtttaataacagtgtttataaaattactttctgattggctaggtccatggaacactcgtgtcaatatctgctgcaaatatatgcctgtgccctttggacttggttttcaaaataattttcatctcttaagcgtggatcagtggcagccctgggagttaggagtcaaggctcctgtgcacggatcttttgctgtttggtcgtgggcattttggaattctcatggcagcttcctgggtttgcacactgaagtgaggatgggtcttgtgtcctctgtgatttctgtatctttctaaagggatttgagattatgaaatgagcagcccagcttaaggatttggtgctcccgaaagaaacatcgtttcactcttttattgagttttatgctctacattttacagatttagaaatgggaaattgtgaatgggtgattcgctatccaagatcaattaagtggagaggagatggtggtaggatctcccctgtccccccaaatccagtagggtgttgagactcttggatataagtaattagatttcaggcaagctctcaagcactcttgggactccatacccaacatttctatccccaagtgacttgcctgactttgcgggaccatcacctctttaccaaccagaggaaacggggtgcccacttgattctcactgaggtctctggatatggagataccatggagagaggaaaacacggcttcccatcttaaaatgaggctgaaccagtcccagggaaaagatccatgtcgttgggattttccattttgatgtaatgacttgtagatctgttaactaccttgtatcttttatgatttctcccagtgggacttccaggaacattttttaaaatgtaccttttcaactttttatttcaaaatatcagattttctaaaagagtttaaaaagatagtatgaggagttacctcatcccctttgcctaggttccctaaatgctaacgtcttaccttcccttagttcaatgatcaaaactgggaaattaactttgatgcagtattacgaattaatctatagaccttgttaaaatttcaccagtggcccactaatgtcctttctctgggccagggtccaatccaggacttcatgttgaatttaattgtcatagctccttagcctcctccaacgtggggcggtttcttcgtctctgtctttcatgaccttgacatttttgaagagtaacagtcagttactttggagaaaaacgctcagtttggatatttgcctgctattttcttatgattagattgaagctatcaattgtaccaaagatgccatgggactgatgtcacgtcctcagtgcatccggtcaggaggaacttgaggtgatctttccttactggtgatgttaactttgggtcactcggttaagatagtgtcctccaggtttctcagctgtcaatttttttatgtttatttttccctttatgatgaaaaagcatcgtgtgggcagatactctgagacaacacgggtcctttttcttttcatacttctgctcactaacgtttatatccgttgggcgatcttgcctgtaacaattattatgatgatagtccaactgtgatttttctatttccctcaatcctacatgtcttaaattcaaattcttctgtaaagaaaagctgttctttctctcctattggttattcattttgaaaaatcagtgtagatgcactgatatttattttatttgatgggttataaatccatgactgtcaatattttgttgctcaaattgtctcagatttggcaattgggagcatcttcttcaaatttggtatgcctccatcatttttaagcactcaggaagtgttttttgttttgttttgtttttacacaagcacataactaaaactgtaccaaaaggtacacttgtataagaagaattgagtctttctcttactccaaactcagcctaaccaaattgagcgaccatagataatgagtatattttaatacattttaatacaaatatatgcattaatttttaagcacagattgaaacacatcatatttgcagttctagactttgtttggttcttttatttatttatttatttttctgagacagtgtatcactctgttgtccgggctggagcgcagtggtacgatcttggctcactgcaacctccgcctcctgcgttaaagcgattcttctgtctcagcctcccgagtagctgggactacaggtgcgtgccaccatgcccagctaatttttgtatttttagtagagacggggttttgccatattggccaggctagtctcgaactcctgacctccagtaatctgcccgccttggcctcccaaagtgctgggattacagacgtgagccactgcacgtggccctgttggtttttcatctgtatattgtgcatatttttccacctcttccatatttttgttattaggttgttgcaaaaataattgcggtttttgccattgcttttaatggcaaaattaataataattgtggagatttcctagttcctttgtagagttctactctttttagagatctactataatttacttaaccattaccctgttgatgaacaatttgattatacataactatatatatatatattctctctttcataactggccacctttaaaggaagggcagtggggactgggcgggggcgggggagagagagagagagagaaagtaggtttctgtagaacaaattccaagaagcaggacttcccaaagatggaaacctttgcccatctgataggtttctgattgtttttatttgcatatctttaattatgagtgacattgaacatctttccatatgtttaaaaatcatttctatttctttctctgtgaattgacttttcatctcatttgcccatttttttcctattgaatgatttgtatctttctcaccaatttgcaagagcttattatatattaaggaaattagcccatttctgtcatttatgttgtaaatatttttcccggtttgccatatgccttttgattttgtttatttttttatcatagtgaggttttaggatttttatgcttagatttatcagtcacgttatggcatctatgacgtgcttgctccttgattttatattaaccccatgttttcttttattctcccccttttcaattttttttttttttttttttttgaggcggagtttcgctctgtcgcccaggctggagtgcagtggcgcgatctcgactcactgcaagctccgcctcccgggttcacgccattctcctgcctcagcctcccgtgtagctgggactacaggtgcgcgccaccatgcccggctaatttttgtatttttagtagagacggggtttcaccgtgttagccaggatggtctcgatctcctgacctcgtgatccgcccgtctcggcctcccaaagtgctgggattacaggcgtgagccaccgcgcccggcctcaatttttgcttttagatccttaaccatcttccttttattttgatgtaaaaagtgaattagggttccagttttattctttgtgtcctttctccaacccaatggctagccaattgaaccaaacaccatttattaaataattcttctttatcccactcatttaaaagccacctttattatttattaaattctcatgtgagtttaccctagttcagtatgctctattttactcaattgacatgtctgctttttctgcacctgtttcaaaccatatcaatgattttgcaattcagtgtagtatctggtcaggcttattcttttttttttcagaattttactatctagttttgtatttattttatgtgatatttaatcttattttaaaattatattccccagaaaatgctccgtagaatttttcgggggtggcagggggaggagaaggtaaaaagctacattaagtttatagatttataggaagaattaatattgttatgacttggagtcttacgtctaagagcaaaatagggcttcctatttatgttgcccagtcattctaaataattgttccttatttagcccctaaattcatattgaggtttatttctgggtatattctcttctctctcttttctcctctctgtccctctctctctgcctctctatctctctgtctgtctctctcattgtatcccattgtaaatcaaatctttttctcgatcatgtttttctaattggttattgtctgggttaacttaaaccactgattcttgtatattcattttataaccagccaccttgttaaattttcctattgtttttaacatcttttttcagcaggttctcataagtattctggtatggagtcatatctttttgcaaataatcataacctgctctttttttaaacaattttagaattcatgcttcttgctccttttccattgcaatgactaatatatttgagagaaatgcgcagtaagagtggtggaagtggacatcctgtccctgacttcagcgtgcatgatttcagcatttcagcatcgagcatctggttgtatgcatgttacagaaatatccttctatgactatttggttgattgtttatttgttttaatcagggatttgtgtttaaatttataaatgcctcttatggaatttgtggagatgatcaaatatttttctctgacataatattaaaatagtgaatcatattaatagattgccttatattaaaacctctttttatttaaggaaataaccctatttgatcaaggcctgttattctttttaatgtactactgctgcaatctccttaaaaatgttatttagaatttgttatttgcattgctgttacaaagcatgattgattgatttttaatattttcgtcaggtttgataaccatattatatcaccttcaaaaaaagaatttggaaatttttcttctctcttttagctcttagagagttaaaatagcatgggtgtcatctgtcttgagaaagactgataaaattaacctgtgaaaacaccagggcctggtgcatttttgaggcagctccctgagaactctttcaattatttttttcatggtccttgccctgtttaaattttttctctctcctctgtggtcaatttcggtaactacccttttcacaaaaaggcattaacttaatctatttaaagctacttgcacaaaattaaatattgtgttattttatatatattatttagtgtttatagttgtatccatgttactgtttctgatttcgtgaatttgggcttcacaaattgaagatacttggttcctcgttttctatattgtgaactgaatgttcatttcacctattttcttgctttcttattgaatagcctccttttttatttttattttttttttatttccatgggtttttggggaacaggtggtatttggttacatgggtaagttctttagtggtgatttgtgagattttggtgcacccatgtcccaagcagtgtacactaaacccaatgtgttgtctttcatccctcactcccctcccaccctttccccacagtccccagagtccaccatatctgaatagcttactttttttttttttttttttttttttttttttttatgagatggagtctgactctgtcacccaggctggagtgcagtggtgcaatctcggctcactgcaagctccacctgccgggttcacaccattctcctgcctcagcctcccaagtaactgggacgacaggcgcctgccaccacgcctggctaattttttgtatttttagtagagactgggtttcactgtgttagtcaggatggtctcgatctcctgacctcgtgatctgcccactgtggcctcccaaagtgctgggattacaggcatgagccaccacacctggcctgaatagcttacattttaaggattatattctccctcctgttatatctttaacccctatgccacacaatttttttaaccagagattctgcaatttccctttcatttccactttatcctgagtaatttctatctttaaaaagtttttaaatgttttttgttttgttttgtcttctattttaagaattaatatctaaatccatatacatcctacacagagactgttggcctatctgtcttaagcatggttctgtactagaattccatgtgagcaaaatgtggtctattgcgttttattccacggacaacaaaaagagtgtttgttttctattttaagcgaatggaattttgtgcatctctattggctttactgtatacattgtgctgtttatttcttcatatgcttcctagtttttaagtacttgattagcgatgagttaaagtctcactattttgttttggtgatttctgctttttaatttcttactttttgtatttgtttttgttttgcttcatattgttctttgtgaatttctttagtgtataatgccccacttaggtaattgggtcttgttcaattgattgttatgaagtgtctcttagtctagttaaacacctgccttaaatttaaacttaactgataaaattatcaaaatctttccttttttcttagtatgtgtttgtgttctgtctttgccaatcattacaattctaatctttctgattcactttaccttagatgagttaaatagacagcataatattttgttttcctttcatcatccaatgaaatggatatatccgtttcactatacatacatccaaagaaaagcatatttttattaatagataagattggcttacttatacttattgatgcaaaaaatgtatttggttctagttctgtgattttacattaaatctttcttttgtctttcttttgtttttgtcttatgttatctgagctttctttgttttattgtgtatgtacttgtatttctccattaatagtatagaaaagttgttgcattttaaatattctaatagttacctttgtatattttcataatactctcaaatctttttgttgatttattactttttgtttattttatttgttccttgttttaatatggaatccataggattctttttttttccttgaaatctaaaatgctccaggattttctaagactctgtttttcaacccaaagtctgcattcctttatttgaggatagttttcttttattacatctttggggttttgttacttttttggtacaagtttaaaagtgcagttttgtataaattctttttgtatttgtataagtttaaggatgtatacatttacaagtgcagttttattacatgaatatgctatgtagtggtgaagtttgagtttttagtgtaatcattgctgaaataatgtacattgtacccaccacgtaatttctcatccctaaccccccattttttgtgtgacttttcaaatactcttttttttcgggtgcactagttatgtgcatgttgaattctgtttgtcttgcttatctttttttttctgtcatccattttagttttggatgtttttaaaactttattttgtttgattggtttgatgggcaatgccttctcctatgaacttcagatactaattttttcttgcctcttttgtgatgcttagcatttgctacctaatttgagagtaacttaggtacatgtctggatccaaaatgagattcagctctgtgaggtcaggaattctgtctcctccatggtgccaagcagcagaccaaggtcctcaaagcagctcaatatatgttcttcattagaaccacagtgtgtggccttcagccagtgttgtccccagagaagggagagagcaatgagggatgaagtagaaagaggagactttttcaggacaggagatcctgcaggggccacaaaggcaggaatagcaaagcccagagctcaccgactcacatgcacacccccagtattccacattccattctgcttttccctgtagtatttttcacacacatgtgatccacttatttctcatgtctgtctatatttattaattccctgctcttccttgcaggaaagcaagctctgtgggggacagaaatttttgtttgctttgctaattagtacctagatcagtgctttgcccatagaaggtgttcagtaaatattttttgaatgaacggaagccaataggtgccaggcaagtgacatgaaagagtgatgtggacttgatatttacatacatatctgtttattgggctattctgctttcacgagcaagagtattttgttgtatcttacttaaagcatgctgccccaccatctcccttttctttttttcttcctctatgcttttttttttttttgtagtgataatttaggtacacaaaagggttcctttaccataataacaagaacacgtttagtgcaagaatacatgctggctgacactcagccagactcttaaggtacaatagggagtggtggggactgtggaaaactggagagcaaatgcctggcctcaaggggcagcctctgctctcttcctgtggtgctgccataagggaaagctgggccggtgttgccacagcaacctgtttttaaaataaaggttctgggtcttcatgtgaaacatcattactgctaaacgttcactcaaacatttttaaaacacacacacacacacacacacacaaatacaaaacaatgacaaaaaaactaaccttctttgggtcaagatcaaataaagcaagctgggtcctggaagggacagtggaactgcctggtggtgacattcacccagatggggaatggaagtcctgcaggttccggtgattcctggcttttcctcctgccatccaggggtctgtgggcaccctccctcctctgagacggcctctctcctgggccactgtgcagagtctaaatgtcatccccatgtgttgcagtggtggctctggagacatcggggtgagctgtctaaaggggtgtcaactcattggacagggtataatttcagtcaacgtgttcctgtcttattttagttcaacatcatttcccagttgcaaaccttttgaatgacacacgaaatgcaaaacaacataaaaggtcctccctccggcagatctgtgtccatgcagaactttaattattctttttgaatcctcataataatgtgctaccccaattctggcaaaaaaaaaaaaattgaaaagtctgatggaaaagatttgtgtcacctgtactaggattccattttattttttataatagtctttatatttttagaagtgctgaacaaaaggaaggggcttctaatcaagagtattctttagatacagagcatcagacaatatttgtgataaatagaaaataactgctctgatagtcttctgcggtgacatttagaatatcacgtttgtctttaggaagtatttttagtcagatttgaagaacagcatctaacatacttgcttggcagggaaggggcaggtggctatgtttagtagttttgagatactagattaaaaaacaaaattttcaccaggaatgaagcagttaggtattattagactttttttccccttttaagagcagcagaggtgtctctcatagatcattacagatgcttcgaaggtctttctggaagtaactgaccttccttctcacatatcgtgccagaattttcattccagagttttagaaagggggtgtggcctctccatgctgcaagctgggtgtacaaagcccagctcttctcagtggggggactcagaggctgaaatcaagcatcctttttttctctccagactcatcaaacagtccatattagatgaaatctgagcccaagagagctccattttctttgaaagctatgcagggtggcctccaagcgccagacctaaaaacaatatctttaaaactgccagccataattcagtgtgataaagtaactatgtttttgttttaaacctgagaacatgtaaagttacaacagacataagctgggtgaggagcagccgggtgggagccggtgtcccacaggctgggtggatgccgtggggccctggggccagcatcaggacatagcccactgggattcagctctgcagctgcttagaggccgggaacctcacagcgtcatctgaaaccacctgtgcttctaggtctttctctctctttcaaaccctctcctcttcaggcttctttccttgattaatttgtattttaaacgaaaacagtttgaaatggtcccccagacagcgtgcagtgcccttcaattcatatccgcactcctcaaaacagaagattaaaaataagtttctggcttctgcacttaaatggaaacctttagtaatcaaaactagctcaccatcaacttcccggcttgaaacgtccatttctcctgctgatgcaagagagagagttagttatttccattggctttcaactgacccttaggcagatgggaagaatgggttccctgttatttatttgggtgttttgggcaatttgctgtacataaaagctctaaatatggcagcagctgatattgccccaaagaaggaggttaataatgtagatttaaatggtgtttagcaaaagcaaaatctcagagacatcagcaaagttcaagtgtcattcagagtctatgaaccagcagtgtttaggggagttcaattttcctttggtttttgggggacagcctaatgcaccaagtgccatcatgtccccccaggggcatgtttggcttggggccatggcagggcctcatgcccaccggtgggtcagaagtggccgttctggatgtgttgttcgaaaacctaagatttggtgccttgctggagtcgcataatagacagcgtcactttcacacctcttaaaagtctttttaaaaatagtccctctagcaggaggcttatttgggatgctgtgctttacacctctgtattttcagactatctggggatgctttttatatatgttgttttaccctcagctccctggttccccgctacgcagctgtaggttgaaggcccagctttgggagtcaccagggagacggggaggtcagatgtttggggtggtgctttggggaggaaaagcaggctgctggccctgacagactcaccacctgcaggccacctcaccggctgcctgcgatgttggaaccccaaatacctcacttccctgacctcctgtatcctccaaggcagacaacctaggaagcccctgccccatcttggacccagaacccactcctcctagagtttttttttttcttttatctctgttaacagcagctctctgtccttctggttttttccagctaaaaatcttgtgtttttttttttgtttttttgtttttttgtttttttgagatgggatcttgctgcatcacccagactggaacaccagtggaacaattggtgtcattcttgacccttctttttgtctcctaccccatatccattccaacagcaaatctgcagactgcaccttcaaaatacagatagaaagaatagcctttgccatctccttatccaccctgccatgagatgggcctagaccaggaacagcccttatttcgttatcaaacagaatcctagctggtctcctggcttcttccctgggtactattttcagcacagtggtctgagtgattctcttaaatgttgcattagaccttgtcactgctatgctcagattcttgggggctcccaatgcctctagagccaaggcagtggccagcaatccccatgcaatctggcttgccactatgccctggctttgagtcttgctatctcttggctctctgccttgctcagtctggtctggccacactggcctccttgttgtgctcaggcccagcagcctcccagggcctttgcatgggctacagcctctgctgctacaatgacttctccatgcataattgcaaggttggtttgatccctcaccttttctgggtctttgttccactgtagcctctcagtgaggcctccctgagtcctcctatttaagatttggaccagccccatcctagaattccctctgcctctttctgcttagtttgtctccaggccttttattactgtttgcatgttacagagctgcaaatgttggggtgttatctgttttgtttgatagtggatcccgtagcactctgaatagtgtctggtactggaggggcctcagtgcattttgtataaatgaatgagtgaatgactaaatgaatgaacagactgactctacagagtcccatgtttcatgggttagagaagtggtgtcctttattggaaatgggcttcggagtgattctggctgtgtggtcatgactgctttgtgtgacttctctgcctctccttcataaatgactcaaagaggtccaggacttgtctggcgtattgtggggtgtgtggcactctggggtgtgggtatgccttgggagccctataatagcatagtagtcaggtggatgggtccaggctcagccgtatgcccatgtgacccctggttgcttggccctccaagttgacccctcctgttccctcctgtctttccagacccaccaggtttcccacacagggtcatctatgaaagcttttagcatctgtctccattcccactgtgaggacctgtgcctgtttctggaatctagagcctgccttgagcctcagggtgctgcccttacctcatcaactgctagctcccctgggaatctgagcccgagcccagaatgatctaacagtgttgggaaagcccttaacacatgcagtgatggcttcctaggtagtaacacttttatgatcatgccatgtattcttgattctgagctaccatcacctatataatgggccatctttggaaggaaaacaataaaaagcctgatctctattgtaaagtgcattattatttcaggcttgttcagttttaaatatgtctggagtcttggtgttgaggatctacagaagcttgggtttgttagggagcagggctgatttgggctcagccatcagggtgtgtccttggaataccaggtgatatggtttggctttgtatcccccacccaaatctcatcttgagttgtaattcctataatctctacatgtcaaaggagggacccagtgagaggtgattggatcatggaggcagtttctcccatgctgttctagtgatagtgagtgagttttcatgagatctgagggttttataagtgtttggcaagttcctcctttcctcactcttctctctcctgctgccttgtgaaaaaggacatgtttgcttcctcttctgccatgattgtaagtttcctgagggcctccccagccatgcagaactgtgagtcaattaaacctcctttgtttataaatcaccaggtcttgggcagtatctttatagcagtatgaaaatggactaatataccaggaatgcagccaggctcaaggagccagcttctctcacaatgaggccagagctgagggtgggcccacaggtgagcataggtaaccaagcacagctgagctctgcccctcacacaataaagggtatgactcactgggccccactctgacctcaccccccaatcagggagtcatgatcacttgaccaacagaggcccaagaagcattggatctcaaaaatcacctatttggattttcccagtgagaacaccattctaatctaggaggaaagctagttaacttgtgttggcctcattatatgtcctaaaatgagaaatgataattattaatataaactaacaatattaggaactaccatttatgaaattatttctccgtgttaggaattataccagaaggttgatattatttgaattattttagtcctgttaagaagcgggcaaggttggcattactgcatccaccttgcaggtgaagaagcagtgtcagataggtttaaaaattcactcaaggtcataatgttgagaggttatgaaaacaagaggcaaaattatctaatctccaggatccctcattcagggagctccccagcccaagtcagttcaaaccgtttctggacagaaacagtaacctggatacacctgcttccatgttctggctcctttatgccatgtaggcatgccatggactctgtgttggtgaatgacatgccctttgggggttggagctgagggctgaatgcatgggggctgagaaaggcctcttgacctattcattcccatgtctcaggacatccttgattaaaaaaaaatggtagctgccctatagaattgaaacggtggcagtggctaaaatattttaaaatgatttttttccacacatgtgggcaagaggttatattgtaagttcaatgctaatcacagttatttaccaagaaaaaaacatccatgtaaaagggcagggcatttggttccaaaaaatgcctgcttgattctgctaccggctgagtctgtctctatggcaaggagccgggcaggagacggctccggccagagcacggggatgataaataactcacaggtgtcagacacacacaagaattatgcgtgtctgacctatgaggggataaatcccacgtctctgccgatggccaggggatgcgtctttaagtgtcataaaaatttagcaattttttccccttcctaattatcttctatatttttgccagatttattaaaataagattttctgggggttattttttttttcttttcactggtagaatgtgctctttagtatcattttacataatttaatacaatttgttccatccattgattttcatggggatacaagctgttcgtttgtgagaaagctggcatcggccagagtgctggcaagacggcacctcgaggagctcattctggttgcaaagttcggtgggggcttcagccatttttaaggcaggtttagtggtgctggagcctgggaggccttttcccccgctacccccacttggaggctcaggaaggaggccgtccgctgccccaatgggctcaggagcaccgtgggcccctgcacgacgcaaggaagctctcccccaacgtgcagtctgatggagaaacacaggtgtttcttaattactcgtgcagaagggaaggggatgctgggcggatgtgcggtgatggtgaccgcgccagatagggatcccggccagcggcagcctgctccccgcacggcccccaccccggccacctcggtgttgcatttgggaagccctaacctccaggctgccctcccgtccttcccgggttttcttaattcaattggggttgtggatattttaggaattagccaaacccctgaaatgtggaggagagacagaatgatgggactggcagtaaggtggggagtactgggctctggagggtgggggctcaatgacctctttcatcttgacagggctccttcctgagcctggaagctgaagggtgccccttgctcctctgctatctgcctccctgtgggtctgtttctgggggtagataaatggttaggtaccaacggaggacatgaaagttctaggctggctgggtgctcacgcctatcatcccaacactttggtaggccaaggcgagagggtcatctgaggtcaggagtttggaaatagcttggggaatgtagggagaccccatctctacaaaaaaaaataagaaaatagtcaggtggtgtagtggtacacatctgtagtcccagctaatcgggaagctgagggaagaggatcacttgagcccaaaagtttgaggctgcagtgagccatggttgtgacactgcactccagcctgggtgacagaccaaggccctgtcaaaaaaaaaaaaaaaaaaaaaaaaaaaaaaaaaaaggctttctatgctggagctggaagacacaagaattgggttccagccctgcctccattgtgctgtgtgaccttggataggttgcttcacctctctggactcttaaataatgacactcttaaattccctcttaaataatgacactcaagttctctgtacaggagagaggggttccgcagattctctgaaggctctcatattctatgatgcgctgagctgtagaagacacagaccagggaggaattttcctgcgttgaccttcccctgacattgtcctgcctctaggggtggcctgagatgggcggaggaccagtgaggagaggcgaagatgggtgcaataccactcagctcagctctgaccctgcgggtgcagcttgcagtaatggctcagcaccaatatgacccacggcctcccagggctgggtggctccggccatgactgcttcttctctgagtgtccatcacgcctcaacccagaacccgtgtcccccgtaccacccctgcttcccgtggggagggcttggaaactgtggctgtcatgtcacacagacagacgggaatgcagcctcctcccgggtggaaggctttctgcacgagggtgccccagacagtgatgaatcatctcccctccagcacccctgggggaacgctaagtaggccaaatgaaatgatccgagctggctgtgggccagggcaacagggctaatccttgcctttgtgggagagcctgggaccagagggtctgccaccagtcacagccgcctgctacgatgctggccccgtggctctgccaccaccccaggaccctgtaggcctcctgactgctccttcaactccctgtgctttccaacagacatacagctctgcaccgaggaggacagaaaacatagcacagcacgctgcagagctccagctcatccagtagtcacttttttttttttttttgagacagagtctcgctctgtcgcccaggctggagtgcagtggtgtgatcttggctcactgcaagctccgccccccgggttcacgccattctcctgcctcagcatcacgagtagctgggactacaggtacccgccaccacgcctggctaagtttttgtattttttagtagagtcggggtttcaccatgttagccaggatggtctcgatctcctgacctcgtgatccacccaccttggcctccctttattttttatttatttatttttttgtttgacggagtctcgctttggagcccaggctggagtgtagtggcatgatctcggctcactgcaacctccacctcctgggtcctggttcaagcaattctcctgcctcagcctccgcagtagctgggattacaggcatgtgccaccatgcctggctaattgttgtatttttagtagagatggtgtttcaccacataggccaggctggtcttgaactcctcaccttgtgatctacctgccttggcctcccaaagtgctggaattataggcatgggccactgcgcctggcccaggagtcacttttaaagcacctaccgaatgcccacacctgtgggagggagaggagactggaccctctgcagctgctatgtatggggcttagactttgtgtggcacagcagggtaccaggtatggagagcagttatcactgaaggcttgctcagtgccaagtgctgggctaagtgctagacaattgccttttatttatttaattttgtttttttgagacagagtcttactctgtctcccaggctggagtgcagtggcatgatcacggcttactgcaggctcgacctcctcgggttcaggtaatcctcttacctcagactcctaagtagctgggaccacaggcaggtatcaccgtgcctttccaattttgtatttttgtagacagggttttgccatgttgcccaagctggtctcaaactcttgggctccagccattcacccacctcggcctcccaaattgctggggttataggcataagccaccatgcccagcctgataattgccttttaaattcttgcaacggtgcaacgaagtggacgtccttattatctcttttgtaaaagaaggggcaaggctcagagagatcaagtaatgctcaaggttacagagctggtgaatgcagaacccgccttgtgctggcctgcctgctggccgcagtgaaagggtgctatgacctgtccctcagtcctcataggctttggcactgtttgtaggtctggaatctgccacgagtttctctgctcctctggctcccctatgccgtttgtcaaccagtgcatccacattcactccattcccttctggggccgggcaggggaaatgccaagggcaggggcagtgagggtccctcctgcacagcagctcacagtgacacaggcacagtggtccctgctcagccagaaccaggtgatctgagcaaccccgtgccatccaaaaccaccaggagagaacacccatttgtgggcagctccactcccttgtttctgccagggagggcattgggcacagctcagccctgactttgagaaagtgtgaacttaaaaaacagctactctctagggaagagagggtcattctttttacaaaagttttatctgcagaatataagtgacagagtgggccggagagcaccaggggctacagctggtaacttgctgggttgggcaggcaagagaggttgaatcggggcattcttcatccattcattctctcattcgttcatttattcattgaacaatattgactgagcaactcatatatctcaggcactttctattaggttggtgcaaaagtaattgcgggtgattgcaaaagtaattgcaccaacataatggatttggaaggcaggatacatcagtaaataaagcaacccaatcctcattctccaggaagtatcccgtgtgtgtgtgtgtgtgtgtgtgtgtgtgtttgtgtacctgcgtgtgtgcacacgtcctgcatttgcatggctgtgtgtgcctgggcatgcaagagcatgaatttcctggaagagaaaggagaccccgggcaggaacaagagcagggctgggcctccgtttcagccctggcccgcagaccctgccagcagcttctgctgagagaggagctttgaaaaatcctctgttctccagaaagccctccttggcacagccgacctcccttctgcctgctcttcctatcttaggggctgcgactgctacccaggctcagtctgggtcactgtcaggacttgctactgggccaaggtcagcagaaacacccacccagggctttaggtgaggccaggctggtgccacggggaggctcccttttattgctctcccagccacttgctgaaaaattaatttgcacgtgaatcacatttattgagaccttctggatcagataacagatgcagaccagcctgttctgcaaggccatccagagaagaaatcctaaaaaattcagtggacaaagggatgtctgctggccgaggctcgctcctagatcaagcccctccctcgaggtgtgcttgtgtgtatttggaaggctcccctggcatcagaggctccaggctccatcctgcaagggctcctggagcggaggctgggccgtgcagccgggcactcccgaccggctctctggattggttctcctgtagcccctcggaagcaaccaggagccggccctcccctccctggccatctgcttgaagcatctggtgatcaggtgcaagccccacaccggagcattcaagctgaaatgtgcagtcaccttgccacccacactcgcttttgttacgcagccaggctgcccctctttgtgtcggggagaacagtttggggatggaaatccgactgctggcactgggaattcaccatggctgagccgagatcctgcaggccgagaggctggcccagtctccagacccggctgtcccctcccaccagggtccatggacatgtctccagcaaacgggttggctttccagagcagggagaagattgctcacgaatgtcttctttacccctctgggtccagcaggtctcagatatttggatcctgccgtaaaggagaaatgcttgtcagttttatgcctccaccattacttaggaaggaaagggtgggttactcccagtgctactgctggcctggactgctggcctagagtgatcgatggctcttcaaggggtgattccctgggttaccagtgacgggggattgggagaaggctcaggacctactcctgaggccgactgcttctgcgctaacccaagcatcttggagggcaacgtgggtgtctgtattgttgaaaacattctgttcttcagctttaataagcacccatcagagagcactcgaggattaatatgggggagttttcatcaccagagagtccatttcattttctgagccactgacgactcagctgagagctgcggactcactgcaccaagaggtgcttttgtttgattttcagtcttataaaacacggcccctcttgccacctccccaaaccactataggcctgtcctcacagctgccagagcccataggcgttacatttagcgttcttctcctggtgggggttcaaggtaaagatctcacagaggacagaatgggaccgcatttgaaactattaactgtgagtaatagttcactggaagaagtctctttgggtttgggttttagtagctctgtgtgaccttaaagatgaaagtgatgtcctactatgtgctggggacgcattttctgttctttctacaatagccatggtcattactctagaatgttgttacatgaagaaacaccaagaaatgtgtctgtaaaaaccagaagtccagccaggtgaggtggctcacacttgtaatcccaacactttgggaggccaaggcgggaggatcacctgaggtctggagttcgagatcagtctgtccaacatggcgaaaccccatctctactaaaaatacaaaaattagccaggcatggtggcaggcgcctgtaatcccagctactcaggaggctgaggcaggagaatcgcttgaacctgggaggtggaggttgcagtgaggtgagatcacgacattgcactccagcctaggcaacagaacgagaatccatctcaaaaccaaccaatcaaccaaccaaccaaccaaccaatcaaccaacaaaccaaccaaccaaccaaccaaccaaccaaccaaccaaccagaagtcctgactaggccccaatctctgtctctacctctcccagtgttaattgtgacaagcagtttgatgttgcttaagtcactgctggctgaaattagtgagagattttattcttgagagacacagagaaattagaaagaagtcaaaatccctgactgactccattagttcatctcaatcccaagttatcttctttaaatgatctggaagattgaattcatgggtatggacaattaaagggtggagagaggaggaagagggctgtggattacagattctagatggtccatgacatgcctgcttgtgagagttctaccagccaagcccttttcaataagatgatcaaagaggaagaacttatcttttaaatttttggaaactctcagcattctataattgatccacttccttagtggaaaaatagaacagccaaaagtcttcaatcttagatactggaatgaaagctaaggttgttcacaggtatagaagaagctgattgtggtatcagatggaatctagctgtcaaacgcttccacaggaatagatagctcaggatgtcgatattcaattgtatttattcttatttttattgtgtattgacaaattctagttttatataattatgaggtacaaagaggagttatggttttaaatacgacgtgggaagattgaattaatctgattaacatatcccatcacctcaaatatttaactttttttataagaatattacaaatttactctctggtaatattgaaatgtaacaaactcaactgttagctatatttgccatgtaatgcaattgatctaaacaaaaattcaaatgtgttcctcctattgaactgaggcttcaacttctggtaaccaccattctgctctctgcttctatgagatcaattgcttcagagtccacatttaagtgagaacacccagtatttgtctttctgtgtttggcatatatcacttcatataatgttccccaattccatccagattgtcacaaattatattagattttatttttatttgatttttaaattttttaaattttttaatttttttgtagagatggggtctcactatgttgcctaggctggtcttgaactcctaggctcattcaattctcctgcctcggcctcccaaaatgcaggggttacaggcatgagccattacacctggccaatattagattttaaacaccccctaaggatctttaattttaaagatgtcatctttttcttttcttcttttaatcagcacatcagtgtaacatgtggtgctatttccctcatgaaacattgcctgtactaagcatgtgcctgaagtgacactgcccctgcccccacctccgtcgtaccccttcccaggagctcaggctgcaggaaggtcgtttccattgcatccctgtgctagctgggcagaccatccctactggcattaaagacccaaatgtctttctctcccgcctcttggtggagcatgaagacaaggtcccattggcttaaggcgcggtgctggctttctccgattgttgtgccgtaagttagcaggataagtttgacagtaatttaattttcattgacaaatgctgtcataatattgagaacaaagtgatatattgtatcaacaatagtggtcgacgctcagccagtcatatggactgggcgagcaccatatggttcttctaagctcgacttggaaagctctggctaagaacttgacaagcttaagataccagtcaggaaaaatgattacccttgagaagttcctgccatgcctccagtctctgaatttcctagaaaaaaggagggagtgcttcctgggtaccagccagggtccaccatacccctggtcggagcagtccctcaagggcacctctgctgacagccggcataatcgaaagtcctgagatgataaaacaccattgatttcctgttggtttgtgtttgttcctggctgtggtcctctccacttaatgccggtgaatgttgcatccacgcgtgtgaatgaggccaggactgaagtctggcccacgttacaaactcacacaatccaaccagaaaggggacgggattttcatttcgggagtgcagctcgttatggctgcatctccagacccccttctgagccaagcagagccagagccatgagtagattacgtgtcagtctttgtgtgcctgggtacgtgtgtgtctgactaaactcttagccaaaatctcagctagatgatttgaccaaaagtgtcaccactgtcaaaagcagtctccatttgttctgcttttctaacactcagcttattttaattctggttactgtacatagaaaaaacaaccgatgagcaaagttacaaacaggctgggagagaagaaagctgggtgtgtgtgtgtgtgtgtgtgtgtatgcgcgtgccccacacgcgcatgtttagggacataccatatccccatgcacattcggctggtgtccttgtctggtttgccaaacgttcaggcactttccattctctgaaggattcccatcccaaacaacgctaagtaaagaaacaggcatatggcgtggattggagatggtgcagtgttggcacagcccttctgctgtggtgaacaggtatctggaaaagatgacagtccaattctgctctttttggagtttatcatttatttggattttgtggttgttgctttgtgtttattattaacttaacaaagagagggagagtgtgcaattcacagaactgggcactggtacaactgctctccaagatggctccctgcctgagccagggctgtccttcttgcaaggcactctcttgtcccaccctgtgcggatcctcggctcccaggcactctggccaggagcaagggctgcctgcaaggtgcagggggagcatctaagtgcagaaggttctctggaggccccaagagctcctgggtgtggctgggggtgtccttggtcttgaaagagagtgttgacttcaaaaagcagggcagattggaggagcagctgccctccttgtggatggcatccgttggtggctgtgtaaagaggagttccggactgcctcccattaccatttcattacgcgacagcagacccatacacagatccatacgctgcctcttggatggggtttccaaacacagcaggacactgcggagagcgcttacctcctctcctgcctgctggaaacccagctccctgccatgtggcgctttctgagctgtggctgcaggctctccccgggtactccagctgatgggtgcccccagaggatgagtgggccgccggagagctgtgcaaggtgccagtggctgcaacgttttccagaagggtctctggagagaatgttcaggaaaacacccagccaaaggatgttttctctcccaggtacctctgggctttggaatcttgcttggtggggcccgggtgtggcgtgtcatcccttcacaatggtggtcagccatgagacatggtgaccacctaacaggagctggcttttcttatctaggctggactcaccagcattttaatgatgagggaaatgagataaccaggtcctacgcagacaggaaaagtgagagggtcattggccctatctgctgattccaggatgggtgatcatctcccccatggcaatgtgggggaagggattggggaccggatgcgtgtcctggctccactgtggctgagcaaagattcccatcctcatgaggcccttgtctcttcatggataaaagaaaaatattgcttgtgaaaaaatgatgatttcccatgttcttcaagtaagaggctccctccttccttcctggggatttatcatctttatgtttaaagagaaaagtccacagggtggaagcacagaaagttattctttctgtctgtttaaacccattttgcgatgttggatttcccccacccatttcgggtgagatctaggcaaggtcccacaatatttttggacactctggaataacgcagggtctttatgtgcctttgagtcataaaagaacctcattttggtcatggaagcacatgtttcaatgtcatactcctaactccaagcttcatgtagagtgggatcattttctggacctggctgcagcctgttgcgggcctggggacgggggcaggccgtgtcttctctggtccctggcctcatgttttcctttctcctgtgcgttctggctaccctggtttcgaacagagtccgcagaagaagtcagggctggaaacacagccatgacagtcatttttctcctgggctggatcctttctggagttctttgggctctcccacatctctaggattctgtcacctacagtttgggcatgttgcctctggctggctgctggctgctagcccttcagcagtgaacatccagtgtcttcctggtgagttgtttcatccttttaggcagcctcttgggcaaagtccttgacagcatttttatgcagagggtccttccatactgacccacatctggaccttgggaaatattcttcatgtcttccagcaaactgaaactggaacctttccccatacaggcctcttttcaacccaccctaagaacagtctctagcctttccactttggcatagctgggtatcatgtcctactgacaccaagggacatggaacaggttctctttgagagtccatcaactgggattgaagtgaaggaagcaacttctgtccatcccctgtggaaggagggctggtaataacatcacacccaccaactctttccaaagaactcttctattttgcaactctctgccttttcaaattatacccttctatagactcaaattgggtcttggcatgaggttgaggacacttgttggccagtcttcattctcaatttggataaagcaagcattcatcctttacgctttgtggtcagacttttggagtttccatctaaagagtaacaaaagcacatattttaacatccttctacccttgatgatcacatagctcttcttccaatccaaacccaaatctttttctagagcatcaccccttttttctcttttgagatacttggcgagagtagagtttattagttttgcacttacaatagcccttctggtacataaacattgattgagctagttgcttctcaccttgcttttctgagaaagactgtgtcttttttttatagcaagggttagacaaaggcagcaaggtatttcgagggtttttttgcaaagctggtgttatgtagacaaaatagattgcctctgtactttgtcttttgctctgctgttggatgtttgggacatcacagcacaacccaaacatccttgtggcttactcatggaccacccagaagtagtcgatgcaagccctgaaaactctttcctgaatgttccagtctgcatcaaacaacctggtatcagctccagatctgttgtgttgacactgcttctggtctctgggaaacactaaggtcaaacttgatgaaagggcagaaagccaggccagggtggctggtctttctcaacccagacctctgatccattttagcatgtctcttccatcagtcgtaaggacttttaaggtcttaacatctcacactgctgtgttagtctgttctagatttgctataagtacctaagactgggtaatttataatgaaaagagtttgaattggctcacagtcctgtaggctgtacaggaagcatgatgttgcatctgctcagcttctggggaggcctcaggaaacttacagtcatggtggaaggtgaagtgggagccagcacttcacatggcctgagcaggaggaagcgtgagaggggggaagtgctatacacttttaaacaaccagatctcaggataacttactcactgtcacaagaacattaccaaggcaggtagtgctaaaaaccattcaagagaaatcttcccccatgatccagtgacttcccaccaggccccacctccaacattttacaattctctacatcagatttgggtggggacagagacccaaaccatatcaactgtttagtcttctgactcactggggagaatttgtctgggcttctgaggggattgtaaggtagtcatgggccagattaggacaagagcaaaactttatatatctttgcagtcaagaacaggacacattgctgtattatgcaaatggaatcttcttccagctaactctttcttgaagtatttcaaaactgtctagctctgaatttcagatattgtactcttagtctcacaatttccagttgatttcttttggcgattcccattttctacctaaactccttatcttgtcatctattttcttaaatatatcaggtatagttattctaaagtctgtaactctagaactcaatatttgtatctttggtaggcctgattacattagctgttgcctgattttctgtctttgtttttactcatttggtcgtatttcctggtgttcctggtaatttttatcaaatgtcagacatggcgtatacaaattttagagatgccttttgactgtatgagaactgccaaataggaatgtaatgtgaaccacccacgtcatttaaattttgtagtagcaacattaaataagcatgaatacatagttaactatttttaagaacgtattttgttgtatttaacctggtgtacccgaagtattatcatttgagcaggtaaccaatataaagagtattaatgggacattttacgtgtcttttttgtactaagtcttggaaatccagtgagtgttttaccctcatagcacttctcaattctgacaaagccccatcccaagttcccagtagccacatggccgtcagctaccctggcaggcagcacagctctggatggtgttatcttcctctagggaggatttacttttgtttccagtaggccattaggcttgcggaagatcaccataagtcaatcagaaattgagcagattttaaggatttatttcttatctgttcttactccttcttctgcccctttaggggtaacaaataagtgtgcggggtgcttatcaggaaacttctgccttacaaagccctagattctggtgtttatcttcttggtcccttggactacggatgtctctgctttgcttctcagcatctcgttggctgccatttgtaagttcacaactgtctcaaggggaaaagcaaagtcaaaagcaagcccagcattctgtgctccttcctttttagaatcttgacctgtcaagtcttggctcctttgataactctattacaccttgaaattatttatatactcacatactggccaggtgctgtggctcacgcctgtaattccagcactttgggaggccgagatgggcagatcacctgaggtcaggagtttgagaccagcctggctaacacggtgaaacctccatcactaccaaaaaatacaaaaattagctgggcgtggtggcacgtgcctgtagtcccagctacttgggaggctgaggtggaaggatcacttgaatccgggaggcagaggttgcagtgagccaagatcacgccactgcattccagcctgggcaacagagtgagagtgagaccctgtctcaagaaaaaaaaaattggttatatacacacaaatacgcaccactgtttttttcatgcagcttttctagttgtgctcaataagacagttgatttgttacaggctcttttactatagccagaagtagaagtaaaataacgtcttaaataactaaaaccagattttcctcccctgtttggcaatcagcactgtttcagcctttgagagaaaacttatttctttacttctgactcagcacaccaaaatctctggggaagaagattatctccccagttctaaggactggcaaattgaggtatcgtaagattgtgcctcgcaagagtcaggcccaagatcctccaggcttctccctgcaccgtcttaccagcctgcaaggcagggaggtttgctgacctggtgtttgtactggtagctcctgaatatccctctgtgcaggcacaggcactccatatcctatatgaagtggtagcagtggccatcattccaggcaagcttacagtttcacagagatcagaggcacattcaaaggacattcatttcttatgcagcatttactaagatgttgtcttataccagacctgggctagggcctcgtgtcagcagcagaatgccgtcattcacagccctgctgttggggagcacgtctcctggggcacatcctggtttggtatgaaggccctgtctgggacatagacacagaatgctgtggacacatgaaaaccctatgcagctgtacacattcccacctgcgtaagtctctagttcagcttcagtaccgcttagttatctctggatcagcagctaaggccttataatatttcaagtataaaatatttaaataaaacattttaccatgttcgtgagataaaatctttagcattaatagaaattttactttttcacaaaaaatggaagttaactgaagcttacttttaatatactacatttaacccaatctgttttacttctcaaaaaagaaatcaacctgtgttttcttgaaagaaaagcaaattctatttttttctgttctgattatttaaaaaatagaaaaaactcccagacattgcttactgcatgaagaatgccacagttttagtttatctcctttcagctttcttcctgtgcctagcttttatggaattgtaatcttgctgtcatatgatttctgcatgtcatatacatgtaatatatatgtgtagtatgaaattttttctcatgttattaaaacgtatatgtataaacgtatggctacactaaaatatcattatatagttatttaccctattgttgaatatgtcgactgtttccaatgtttttattattacaaatataatacagggaatgtctttgaacataaaggcagctcctcttattccatcttcaccctcgtgctttagagtatttctctagggaagaccaccagaaatggaattactgcatcaaagcaatgaaatatttatatcctttttcacttaattttaaacctcagatttactcctcaatgggaggtcacttcccgccaaatctcaaatccaagacaggaattaggggcttctcttggccgggatgtaatgcctgtcccaagatgaggagacctagaggatggcagtagagtggggcaagtccttgaaggtgtttgaggggttggttgtggatggaaaagcgactctgattgcaaagccaaggataatagtacgagccaaaggaaagcctatttaatgagattggccatgcacttgcaggaaaaccttttgagaaaaaagcacagcaaagtttgcgggaccacctccctctgcaatggctgtgttgatgggggccattgctgatatggcgtgggtgttggattttgggaaccgaatcctattttagatgcattgtgagctgaatcctattttagattgactcatgtaaggaaccccgtggtgactctataaatcagaaagttcgtttgcattgcaaatcgccctttcctaagtaatcttcagctccttaattttacaaattgtatattggaaatcttttatttctgtatattggttgttgcaaagtacacttggaggacacttggggcccatttcaaccagggggtttgagggtcttgttgcaggaaagttcttctagtcaatccttccctgggggttgacagtctgtcctccatctctggtggacagctgatggcatttgccttccaggttaagccccagtgagaaagtcactgccaggacccgcaagttgaaggaggaatggacctcaaaagcttcagaggggactgaaatgtgttggctgattagaaggtagaaggtcagagagactagagaaaactcaaggcgtgagctgagcctcgggctgtcattacggagaggaggctgaagtttcagaaggaaattttgatcatcagaagtgcctgcaggaggtcctcgactctagcaacagattagatcccactgagaaaggagagactgttgtgctgcagaccggttgtccagatgggtttcaggagatgatgcaaaggctctgtctgagggtgagatggatgagtcagtcagtgccttctttgagtggatcaaatatcggtagacttggatctctttgtcctgagcacctgagtgaaagaggctgtgtggggggtgagagcccagctccctgagggacacaactgaggtgtctgtctaacaatggcctcagcactgaggctttcttttagccttttatgtcaacaccaaaagtcatggagctgggccttagaaacattgttcaaaagtcatatcttaagttatgacccgtcttgaagtatttataactgattggatttcataagtaaagccagatttgcataaattaataaaatatttcaccaggtagcatcctttcccaagttattggggatcctgtggtgggggaacgggtgcttcttctcctgctgggttcatgaatctatccattccactgggactgtgtcctccatcccagccttggctgctgaaaattgtgctaaaatgtcactgaactttgcaagttacttaatttgctggggtattacttaaatctccaaacctaattggaggtggatgtgagagaaacacactaagacccacactcgacttgggaagatttggaaagagtcccatgatgtcacgtccctgctggggcttggtggaacatttatacaagtatcagtaattatttaacaatcaccttgtcctaaacttttataccatttatacagtgtttaatgtacattgatttcttcattttacatgtagtaattaattttgtcttactgacagatgattctcaatgactgatttcaagacacattccggacaggtactttttaacgcttcgttttgcttcaaaaagccttattctactctggggttctgccagctatcgcaaagcaatttctgcaggggggggttttggggcaccaacctgtgtggaagcatggaggtgggaggtgagttttcacgtacattgtatgttcacttagggtagctttgggtggaagattgggagttgcgttggggggtggtgcttacatctcccccagttaacccttttctcctcttagtgaatattgctttaggccatgcttgagtgaactccagggtattagaaaaagatttctttgctttagaaagcaaagtagaaattcccaaattcaatttgaatcaaaaattggggggaagtgatagaatgaaccaaattgaaaggcaaacattttttgttattgatttcacgtttcgatctctgttacatgtgttgtaaatgtcatctatcccaaggtgaaagcttcagagacaagtgtttaaaatggcagtggagccacagataacaagtgagctctgtggtttaactttacttgttcaagaagtgcttgtccacttcagttgtccctgggagatgttggaagagggatctgcagtcaaaacacagtggggtgcattttgatctgctatgcttagctgtttctctttatatgtatatttttaaaaatttcctccttcctttcattcttagtttgtaatctctaagcatgaattcataacgatttggtttaaagtatgtacgtctccagagttaaaatggagagaaagcctatagtggacatttctttcttttttttttaattatactttaagttttagggtacatgtgcacaacatgcaggttagttacatatgtatacatgtgccatgctggtgtgctgcacccagtaactcgtcatttagcattaggtatatctccaaatgctatccctcccccatcctcccaccccacaacaggcctcggtgtgtgatgttccccttcctgtgtccatgtgttctcattgttcaattcccacctatgagtgagaacatgcggtgtttggttttttgtccttgcgatagtttgctgagaatgatggtttccagcttcatccatgtccctacaaaagacatgaactcatccttttttatggctgcacagtattctatggtgtatatgtgccacattttcttaatccagccttttatttgttggacatttgggttggttccaagtctttcctattgtgaatagtgcctcaataaacatacgtgtgcatgtgtttttatagcagtgtgatttataatcctttgggtatatacccagtaatgggatggctgggtcaaatggtatttctagttctagatccctgaggaatcgccacactgacttccacaatggttgaactagcttacagtcccaccaacagtgtaaaagtgttcctatttctccatatcttctccagcacctgttgtttcctgactttttaatgatggtcgttctaactggtgtgagatggtatctcattgtggttttgatttgcatttctctgatggccagtgatgttgagcattttttcatgtgtcttttgcctgcataaatgtcttcttttgagaaatgtctgttcatatcctttgcccactttttgatggggttgtttgtttttttcttgtaaatttgttggagttcattgtagattctggatattagccctttgtcaggtgagtagattgcaaaaattttctcccattctgtaggttgcctgttcactctgatggtagtttcttttgctgtgcagaagctctttagtctaattagatcccatttgtcaattttggcttttgctgccattgcttttggtggcatttctttaaaaaaatttttttggggggaatcaatgccttggtgccttagcatcagaggatatgactattataggacactcctgttattattaatgaggaggacatgtatccttcattttgcaacttttcatcctcagtgaccttttaaatatggaaactgttgaagtcacattttaatattaatgaatgatgtaaaaggtaaatgaagttcaaattattctaatacttgcatgttaggatctgtgtctatatccatatcttctccacaggcttgtcataactttataagtgtcaaagggatttgagtgtgaagccccacagatgagggccgtctgctagtggctgcagcccacttagcggatggcgccaccctgcagcagggagcttcccatctagacacatatgttctgatgcttttggtcattattctgacctagacattcaccaagaatgaagaaactattcgtttggcgaacaacacgtctgcattttgggaaagttcgccatgccgttgcccagcctggcttcttgctggataagctttgggttggagccctgaggacagcaggtctcagatctagtcaccgtcttctccagcctcctgctactgcattctgtagctctgtctccaagtgcaagagtttggcccctttggggatttctgccattattttttcagagaaggtattcagctctggtttggcttgtagcaacaaaggtctttttgtgtctcacgattcctctcccctctgcctcttctttcatccctgtggcatctattattaccgtaatgtgactaagggggcctttccccctgtcatgtgcctccccaactgtcctggtggaaaatagtatgttcttttttcctttacatccatcatttccacctaagcacagtatagcagcctctggggaaagaagcttgagcctgcgcacacatgttcacgactgtgtgtacacgtgtctaggagcacgaatgtgcacaatgtgtgtttaggcaggagtgcatctttgcaaggtgtgaaggtgtgctcatgaatgtccctatgtaatgtgtgaatgtgtgcatgtgcgggtgtgtgcgtgcttctgcatgaagccatcggtgtgtacgtgtggatgtgtgactttgccggtcagtgggcacagctgttgatcacgcactgtccagaccacagtgctttagctccttctagacattttctccacctttatttgtgttaattactcaagtggcaattagtggctctgccccccttttggtcgcagtctcgtagtatttgagggatggtcatgtattcatcatatttcaataaatcctttccaatgttattgcccttgttgtatcaactggcacctgccctccgacgttacacctgcaggagaattccaccacgtttgggcgcatttccgaagcaaggctattgatgttgtatgtttaaaaaaattaattaaaaaaactcagatctcgggaaattccagcagtcagtctcctttttttatcctaatctcttcatagtaatgctcacaagtacccttggtccagacaattcttcattcattctccaccccccaccacactcacacccaaactccccaccgctggagattagtcctttgtgagtcagtgcacaaaagctttcttaaagtcccagtaaattatacccctggtttccctcttgaattcctttttgttactttttcaaaatattctattagttttgttacgtatgatctcccttttgtgaatccatgctgaatatctttaattaaatcataactttccctattttgtccctgattagtgtttccaatatcttccccactgctcaagtcaagcttactggtgtttaatttctttgatctccctttgagtcgttattaaatataggtgttgcataagggctcttggccactggtgcttctcccgtttccctgggtgtttttaaaaggtatttgctaaccgttcccctgtttccttgcctcttcttgcacaaattctaagatggttcccatctgctcccggagttatcagtccttagacactctaatttctttctcacctgttctgctactaggctgatttccttcagaaatattttcctctccctgggaaatgcttgtctgttgctggcatctgctttcgtcttccctttatggacatgaaagcaaataatttatttttcattttctctagaagttgtcatccctccttccaatcaactatgttctatgtatgcctccttgtgttttttaaaagagcattataaacccagttccagcacctccttgctaagaccccaatttggaagtggtatttcctttccaaagggttgatagcatcaccaacttttaatctggggcagggagtgctgaccctttgctagcgaaactgttttggatgcccccagctgtcctacagcaagcagcatgaagtcttgaggcttccctgacaaccggtacaagagggacctggccccatctccgggttttagggagttgtgaagtttcccacgtgtcgctttggaaatctctcatatgaagtcagcttcagccaggaagcttgccttcacttttcttctgctcagtgcctccaattttcctcacacctgagggatgcatcggttctcctatggctcgctccccttcaggctgtactgtgggctcatcctcagatggaatttccttccttttctgcctgtgttcccagaacacagactaaaaagggctgctccatgcagaaggtgcacacccacgggctttcagatgctcttagctgcaggtgccctgtcaaggggctgggcccacaagaagcggttccgagtccccaacctgcggccgcgtggaagcctcctcagatagcactgttcctctcagcttgacctcatttccttttccagtacaacccagatctgcgtgctgagacatcactctcaggttgtaaattctacaccaaatcaaaaggccaaatcctttctgcaaacccacaggcgctcgacctacatcacaccaaggagcctggccccgatggctatctcaggacccctgggcaggggcagcagaggtgtgagcccccacccctccagcaccagctactggccttctgcaggacagcaacttccccggatcaagtggcagaaacagcatcagccaacgtttccacagagtatgagtcataaatagtccttttcacattgtttcacatcaaaaggcaagcagcctgtgctgttccccgtccctcatccctaacatagaagtgcgtgaaatttgcccacaaacaaggatttgaaattttaaaagctcaataaaggtagtcaatagacacactccagtcagtttttaaaaagtgtttttaattgggtcaaatagcatgttactttggggaaaaataaagatcatttaaactggttcttttagttcacatgtttttgaaaactgattttctggtgcagacctagttcgaaatatcatccggaagtgctgatgataaacgggtgggcccagggttccctctgaactttagggggttcttcttcactgtttctccgaccactgtttcttcactgaaagagtctatagtctcttcacttcagggcgatggggtaggacggctggggtcctgattccatagttaaccaggatcaaccctgggtcttgagccacctcactgtatgcccgacagctgccccagacagggaggacagtcctctgtcagcctctgagcaatgttccagaagcaatttatagatggacttggtgagcaaaaagtgagagtcacaggtgcttcataataattgcttgcacatttccagaatcggacattctgtcatttaatagacctaaaactaaaaagcttttgtctgtgaaaggtgaccagtagaaacagcgtttggattatatgatatcccataacttaatcatatggctcttaacagggggacatacacagctgtgtctcactaatatgcatgcaatatgtgtaaactgatacgctttaattctaaacttgtttttagcaggaagaaaaaagcatttagatgaggaacattaagattcaatattaaccattttttcccctttgggcaaaattattcatcacttgatatttattaaagcagcattttccttttttttttttttttttgctattgtgagatgcatcctgctactgattttccaaacatcctcaaagttatgtggcaaagtgaaaaagacacaggaacagccagtagcccctttggggtcacaggaaaacaatagacttgaaagatacacacttgttcttttgaagcccgagagtcatcctaacccctaggacctagtgacaggggcaaagttggagtaattaatttagaagggggctgactggttttccacctctccaattacacatatttgatttgcctatcctgtctgacgttttaattgttagtttatactggtttaatctgaaatatttaagtatatttgctttgataatcttaactaaaaaaaaaaactaagacaaaggaattgtagattagagactttattttcagggcaaaatgatacgggtaagtgaacatcaactgaccagaaattatttgcttctgtctgttagacacgtaatggagtcatttaactagtcaaattaggagctgcagaaatgcaccatgcttcattactgagttcgaatgggcaccattttacatttacgtcaaaaattatctcatagcaaattaatgttttcattgtgcagaaaggctgaagctatgcagtgttagcggcacctagaggccattgcgaaaatacttcaaagggatgatctgcaaacaaggacaaaatgatcaatagatgagtggtggtggtgagagccctgaccccgtttgaaagtaagagtagtcattgaatcagattggctctcttggtgaccatatgaagctctgaggggccatgacggttttcctaaacttggcctagaactaaatgtgctgaaagagccccaaagatttctctccttttcttgttactctttaagtcctgaaaatatctgtttttgttttgttttgctttgttttcacagtttgagtttgctttttcttttacctatgggcttacattatatcagaatctcatatgttagccgatgagcatttctgtaaataagcaaggagagattttttttcctcccacattgtaaattggcatccttagaatctttcttttgtcattggtaaaaacttgctgtccgtagaaagaggcaacacatgacactgtttcatcttaaaaaatactgaactgggtaaatcctccatccaaacagatgaccaaggttggttgttgtcccaagaatgtcaatctctgctcaatttagcgagaaatcatgttaaatgaaatggcaaagccctcaccaatgaaaatatgtgttaaaatgatctgcaagtcgtcagtgacgctgggacgttggagcatactgtcagagcagaagcaaaggagagaatggaagcatataaatagcattgagaactcgagaatatttcaagacaatattgatgtctaaaatatatgtgaatgactgcataatgatcgaggcagacataattcaaagtacagtcagaatctggcctccaactcagagctttaaattctccaaaagacatctgtttgctgagaaagcctcaccaacagctgcgccacataaaggggagaacccgggataaggttgggagttggcaggtaggggagcctcagaggggttaggtggggtcctggagggcgggcgcccaccttcactccacaggtaccggaagcggggctgctttggacaaaggcgagggaggtgcctgtatttcctagaaccaggtagcaaatgttgcctgtgtgtttcatcagaaagcgccccagttgggcactgtgcctcttggatgctgacaagaagatttgacgttacttctctggtccttaactttgtttacccagctgctattcttcccatacttaactctttcaccgtgcagaaagcaagggggagggaggaagggaagctccaggtgtgatttttcagaacaaaatataatgctgtgatttatttttaaaaaagagaataagcacgaggaaattgaatagcatccatttcatgcttaaccgtggttcacaaatgatagtttgtaattaaaattctgtctgcaaacctattctgcagaccccaaaagaaaacttcctcagaatgttatcaactctccaatttctgtaaagatgccatattttcagatttcaaagagaggatctccttttgaaaataaagaattgttgggtatcgtatgagcctgctaagtacagcattttaaacccacactgtgttgaaaaattcaagaatttggcagtgaccttaaggccacagataggataatgaaaaatgaggcgatgagggcagtgtctaaaggaactactcttttgttctaacagaagctttgtgtgtgtgtggcttaagcaagtggttcaatagaatttctttgaaacagaaacaaaaatgctaagagctggttacaagtactctggtcttcttttctccttaaaatgcaggaagaatttttacctcttctcatgaatcttgtctgctgaaatgtctcagtcttcatgttatgtttaccaaggccaggccagaggatctgataatttataaccattcctattgggttttatgtaataactttggaactcatataaagtaatgatccacaaactcttttaatgttcattataaaatatgaaatatttctcagaaccattgcaattatgtgaccagacataactgtttcacacatgagtaaatacagggaggtttaacataactttattatcttgctgtcttttcttctcattgatgtgataatactgttttaatatttttctaaagaaaagttaagtaattttagaatctctactgaggcccgctttattggcttttgtaatagaactctcaaatctaattgtatttatgctcagactgacaccactaaatgtcgtgaatggaagggaaatgccccccaaagctgtgtattctgtaattatcgatagatgtgtctctgctgacgaggcctggggatctggggagagtcacgcaagtaaagctgagatggcagcaggcatttccaccgtcatcctgaggcccccatggatgcagagaggtgcttttctaaggagtgaatgagccccgtcattctgtaggactcaccaggaaacttttccccctttactgtgtgtgctgtgtctgcctctcctgggtctggagtcagtagcatgcaacttctagtttcgtagaaggctgatctccgaagggaattttcctgggcttcctgtcctagtgatctgagctgagtggcattgttccggttgcttgaccttcacctggggcgtgggcttggggtcatccctggtggctgtaaagtctcctgcagcgatggaagccagagagggattattctggaaacccacttcttactccccgtgtgggcagtggaagctgtaacaccaaggcggggaacccagtgacagtgctgcatccactctcgatgccccgtcagaatccaggatcctcccaggaccgaatggcggctatttctagcctagtaaggttgggtggaaaagattaaacatgagggaaggtgccgttatctgggcatttccaagtcctggagaggagagagggtttcaccatgcttgactcttttatcttacttgtttttagacaagtgtttctcaaagtctcatgtgcaaccagatccccatggatcttgctatgatgcagattctgactcagtagttctggggaggaccctctatcctgcccttcagctccagggtcatggctgtgctgctgatccagagaccacacattagatctgggtgtagcatctgtcttctcactgcacatctgctttcggggagacaagcagacacagggcatggaaggttaggtggggccctctgagaggcctatgagtgcaatgaaacttgaagagtggcctgatggctggagccagctcacagttgggttttgtttgacttgtccgatattacacttttgctttcaattggttgcacacagtttaaaaatgaaagattttttaaatttacaaatccaggctttcaggttctcttgaaaaactagaatgtctgggacaagagatagaagagaggtgggatccgctcccttaggagcagaggatggaagagaggtgggagccactcccttaggagcaggggacggaagagaggtgggagccgctcccttaggagcaggtgatggaagagaggtgggagtcacttccttagggaggtgtggctcttcccttctccgccaaggggtcccgcccagcctgccttgctcataacacaagagtttgcagacagggaagttagaccccaggaaaagagggtcacttccctggcacacacagggcatgtgcaatggtggaggctgcgtgcccccctgctgctggctcttgtctggagtttgctggaatggagaactcttgccccatcagaacccaggactcacctgcgtgctttagctctgccttctggcaagtgccatcttcctctttgaggagctgttccttagctctctagttctcacaagcaagccactagagagggtgcaattcccagctaattaaaggtcttgagatcctcccctccctgtcgccgacgctcctttgaaacaagcgggctgcataagaagtctccctggctgctacctggcagcaggtgtgagccaagggctggtgcccaggctgcgtggggcccagtggggagggagcctgaccttcacctaggtacatccaacaggtgtgaccgcccggcatagtaatcacccagttcctaggtgggcagtattggggatcatcacaaaatctggaatgttcattagtgcatgaaatcatctgatcatcttcccacttggccctcttcactcctcaccaccccccttattcacccctcaccaccccccttattcaccccatccccagtctctcctggaaactggtgggttgcattggagtcagatgtggcaaaacacagcctaagtcaacattcgtggttcctaaagcgaaagaactgtggaatgcttgtattcaaagatttctccatgactgcacctggttgagtgatgaaataaaggtgaaaccaaaaagacctttctgcttccctgggcggtggctatctaggtctttagttcttttaaccgggcgattgttgctgtaatgggtctcagtgctactggggcactgactgaggcttgttttttttctccatgaagaccaggaacccagtgccctggaaggctggtggcttaggtaaatttgagggctgggcttgagccaggctctgctgagctctacacttcagctgtgtctgccacccaccccccacacacccccccatgctgggcaaagccaccgtgcttacagcgttgactttctttatccccaagcagcattcagggctaacttttcagaaatttttatttctgaatgctggttaaaggcaggatcttctgctgccaaatttctcaagctgtcacctgcacagtgaacaagtgaggagtggcctgaggcacctggctgtgctcctacaacgaagcactctgttcttagggactttagtactgggtacatctagggagttaggaggactcacaggacactcagattgacagctctcagcatttggctgctggttaaataaatctcacatgagttaaaatttctacatgttctcccatttacaagacagagtaaaatcagcacttaatgggtcttgtagagtattgcaatgacagactgcataggggtagccgggtgactgcaagagcttcctgctctcttcatcatcttctcagagagctttgctcatttctgtttttgaatgtgaataaaagaatctattacatattacattcagagaaaatggtacgtggtacccaattgtggccacatgcaaggggaatgccatactgagaacccagcatgctgattggtatagggagctggaagtcattgaatggggaagggctggaagaaactgagggtgaactcagccctcacttcaaaggagtttgccgtcaactcagagaaatggagctaaaccatgcaagctgcattgctacccaagacatgggtgggaagggaatgaggttggggaatagggcagaattgagctgggcctgcaaagatggggagggtttggctaaaacctaggattttacagatttatccaagggaggaatctagcaatgatctccttttgctctttagtgtcttttcctctggccggttaaaattccctgttcatgttggcttggtggcttacacctgtaatcccagtgctttgggaggctgaggtgggaggatcacttgagcctaggagttcgagactagcctgggcaacataatgggaccctgtctctacagaaaatgtaaaaattagctgtgcgtaatggtgcacacctgtagtcccagctacctgggaggctgcagttggaggatcacttgagcccaggagtttgaggctgcagtgagctgggattgcaccattgcactccagccttggcaacagagcaagaccgtgtttcataaaaaaaaaaaccaacaaacccactttcattgacatctgcatgtatttgagagggctcaaaaatgaggcaagtttttgcttctgcagcaagatggagttctagagtcctggagaccttctccttggttcctctccagtgctgtccttggtgttactcaaaggaacaattgcctggtcttctgaattgggaactacttagaatataacagctgtgctttatatgatgaatttaattcttttctaatgaattttatcagactgctttttggagcacatactggaatatggcagtgccggaccattttccatcataagaaaataaattaacttaggattgtgaaatcacattaaaacaatatgaaaactctgccatgcttttggttatccccttggctggagcacgttgcaccatctctaccctgctggaaacgcgctgtcactctgtctccctgtgccctgtgcaacgatgctcatggaactgttggctgtcaatgttgttgtgtgtacaaccggagcagtgaggttagttcctctgcagcacactctccagagagtcaaaggatgtcattcccttctcggcagggacgcaatcatacatctgctctctggtctgtgacacctcactgtctactttggctgtgtccctgggcagcaatgcctgtcatcattttatgaggcacaacagaaagcctggttcactcctgacactgcgggacaggcaaggccaccaagccagtgtcattaggtgcccctggacttggagggcctcattctgatgtttctgctctgcacggggtcagtctgaaccatggaaatcgcaggggagatgcgagggctgggagcatggcctgattggaaattgagaacctgctttgaaggcctttctttcctttagttatctccttcacaaagcctcctcccggagttaattcacaggcactcatggccggcccttttgcagggacactagaaagaatcagcagggtaaatatttcatccgaaaccacagagatgctggcattgctggtgtgaaaagtgtagaaagaatacactcaaactatgtccctgcgttttcccagtggtatgtcttgaccacatgtagccagctggaccctccaatccaggagcaccttagaaagtcagatgcatctaacagactgggggagagctctggagagggtgctatgtgggtttaagctggaacgtgatgtcctgtaagtcaccaaaactgcctcagctttagtattctctgtgtaatgactatgaaaatagaatctacctcaaatagttaatcactctacagacttggagagtccacaggcaacgaggcttcagggagatcactgagaaagcagcaatgtccaagaggcggccgccagcagaccctgtgctaaagccacctctcctgtggcagctaggagaccagactctctcggtattcctgccactgctccgacaacgtcttgatctttcctactgaccctctctcccttctttgctcttctggccctccttggggctcagccccgcttctctttctcttccccctgcactctcttcctggaaggactcatccttccttgcagatttcatgcctctcttctgctgatgattcaaacaggcacttgcaactctcttatcttctccagaatttcttctctgatgttctctttgacttctccactttgacatctaacaacctcaaacctcaaaacttgcagttatccttgatttctcctctctctccagtccaccagaaagacctgttaattccatctcaaaaagaaatcaatccagaatccttcttcccttccatctgcaccctgaggaatgggtgtcatctcttacctggattatgccaaactgatctaacagaccttacccaaacgtttttacacgcttcagctagaaggaacttctggaaatgtaaatcagaccatatatcctcttgtttaatacccttcaatggctttccattccccccccccttttttttccttcagatcgtgtctcgctgtatcacccaggctggagtgcagtggcgcaatctcggctcactgcaacctctgcctcccaggttcaagcgattctcctgcctcaccttctgagcagctgggactacaagtgtgcatcaccatgcctggctaatttttgtatttttagtagagacagggattcatcatattggccagactagtcttgaagttctgacttcaagtgatctgcccactttggcctcccaaagtgctgggattacaggtgtgagcaaccgtgcctggcctttctgttcccgcttgattaaaacccaagctcccctcagccacaatgcccagagtgatcaggtcattgcccaaccttcaagctcatctctcaagctctgctccaacccacagatcttctctccgatctttaaatcggtatcccagctctttgctgacacctcagggtctttgaatatactgttctcaatgcctggaatgaatgacaacctctctctgtcacacacacacacacacacacgcatacacctggctttgcctggccaactttttctcattctttgatgatttcttaccttccactcaaaaatggctattcctctgttattccctctgtgggtcccattttaacttcttagcagttattaaaaattatgtgtgtttgacttcttcctctttttttttctggtctgactctcccaccgaattgaaaactctaaccagtcagaaaccatatctgtcttgttcacagcttagtccccttcacggactacagtgaccagcccagagaagagaagaggttcagcacatatttcttgaatgcgtacataagaaaatatacagagacataaacttgctaacatttggcctagttgttaggtacataagtaaacattcatttttactcctgtttaaaataggtttcttgtatctgggcagtttgtcagctctcaggtgggtccattagggatgttgaagttttgctgtcaggaaatctgattttaccgtttgggtggggatttctcagagattcttgaactctttggcaaagctggtggtgatgcagtgtattagtccattcttgcactgctataaaggaatacctgagactgggtaatttataaagaaaagaggtttatttggctcacagttctgcagactgtacaggaagcatggctggggaggcctcaagaaacttagtcatggtggaaggtgaaggggaagcaggcacatgcttcttacatggccagggcaggaggaaaggagggaggtgggaggtgccacacacatttaaacaaccagatctcgtgagcactcactcttgtcatgacaagaccaaggaagatggtgttaaaccactagaaaccacccccatgatccaatcactcccaccaggtcccacctccatcactggggattacaatttgtattagtctgttttcaagctacagataaagacatacccaagactgggtaatttataaagaaaaagaggtttaaaggactcacagttccacatggctggggaggcctcacaaacatggtggaaggtggaaagcacgtctgcatggcagcaggcaagagtagaagtgccagcaggggaaatgccagaagcttataaaaccatcagatcttgtgagaactcactcactataaagagaacagtatgggggaaacagcccccatgatacaattatctccacctggctccaccagattattacaatttgaggtgaaatttgggtggggacacagccaaaccatgtcactatttgacatgagatttgggtggggacacagatccaaccatatcatgtgtgcaaagtatggcctatagagtgagcacttggactcacctttctgcagagtctgattatgttcagtctttgctcctaccctgtttgacacaagggtgtgtgtgtgtgtgtgtgtgtgtgtgtgtttgtatgtgtttatcctcttcaatagatatcaatgatttcataaagccccatctatacctcctttgaaaaagccacagataacttgtctaagggatttgttcacaaatgatagtgacaggctggtcactttgcctattcgtggagaaacaattgttgttttcttgtctctggagacctgcagatctggttatttttgaagataaaccaggcagaaggaaggaaaacccacatgatggtaatccttcaacagccatggcagtgtgcagtttcagcacccaggctctctttacaaaaacgactgagtgtcagagcacacacctttccgagagacgttgtttgactatttcacctaagagctgtcacaaagaagccatctctgatgttgggaaatgctgttgacacccctggttctacatggatccctctccaccctgtcatctctttggcagcgtggaaataaaaatatatgtatcatttcatttccggggactctgctgttaaaatatataaatgaaagaaattgacttcaggccccaaaataaatatataacacagtaagaactgataaactaataaatatctatcaccgttatatttcatgatttcccaaagatatctgaagagcacttaattgttactgagtaatcaattattcaattaaccttcttctcattgaatatatatttgatacaactttttgaagcttcagctttaaaaggttcctatcgattgcaagtttcaaggccatatggcctgagtattggatttgtgccgtcatgattgacagtagcggctagtaatcacatgcaactatttcagatggtgtgagtttcagtgaggaggtcacaatggtgatgttcattttatagataaatatatttatgtgcatgtgtgtacatatacatacacaaaatctctgcctcatacatgctccgcagcagccttctgcatttacacatggcgcctgtttcgttttgtgcaaacattgaccaaatacaggccccactccagacgtgagcccagtgttccgaagagtaactgcatcatctcagaggccacccgatgattccgtgatcggaattttggaagtcttctatttaaacaagataagagaccagcaatgctctcaaattcaaaaattaaattgcatgaggcttggagttgcaagttgaaaaaaaatcatttcaattcaaaggaaatcttttctgctctgctttgctctggtttacttctctagactcttcttaggcaaccttgggtgtgtaagagactacattgactgactctcttaatttaatctttcttctgatgacagatttttgggtgagtgtgcagaattgaatagtggtcatgatatccttgtgtgatataagtcagcagatgcaatgcaatgttcaagaactctttgtggtgtcctgcaaaggaaaaggctggtataatggatttgtaacacatccctagaaatatgtagtcctgtgaacactgtgttattaatataaataggtgcaagcttttgggggggccaaataaaaaataagtatcaaataggtataaaatgtgtgttccctctcacccagcaattctacttattggaagtttttccaaagaaaattatctgacatgtcggggaaagactttcgcataaggatattaatcaacacatcctttataatgaggggaaacttagaaaacaactgacaagcccaagaataggggtgaagctaaattaggcacttccacatgaagaaacaccatgtagctataaaattatattgcagaggaataattaatgacagggagaaatattgaccttacctataacatttagtgaaaggctgtatttgaagcatacattgtataaaaacattagatagttatggctggaaaaaatatttggagtgaatttacattcagaatggccagtggtttttttctagatatggagatggtgggagatcattctttgttctttgtgcttttcgttattttccaaatattctatgtgtttgaataaccatcccctgacgaccttgaaattaacataacttaatagctcaaagcttaaattatttgatgcacccaactttcccaaaaatagcacgtgattgtggagtccctccgatgccatctcctgccctgtcctctcttaattctgcctcccggctcccggatggagacaatgctgagctgtgggtgctgggatgggccccccagaagacggtcataatcaagatattagcaaagactttctgtcctgaaaaatgccgtaaacagactcggtttgacctccttaatgcaggagcactttagtaatctgtgcctaatgattttttacattaagtcccagcttgtgttgggcccttgtgaggcacagtaatttaagaacagtcattttgcacattccgatctcattatgttacattgttactgaataaagactggtattatgttgctcccataaagggcagaagtggcctgaattttatctgctgaacgaatcaatctggattatgtcagttgaaaagaattgtggactgcagtctctcccgcagatggggggggatagttttttgttttttgattttttttttaatgtatctggttgttctgaatacatgaactacgataatacctggtggtgactgagtagtagtttttctctcttatttttcaatgaagagtgtaccaattatcatttcaacataacgtattaggagatcaattggaaactgaaagccatttccccatgttaatgctgtgttgtgtttaagctgccctgacggccggtcggggctgtgggaaaaggctgagcaaataatgaggaaagagcttagaaaatagacaagggtggggcttggcaggggatgtgaactattcatcaacaactcaacgaggatgatggaaataataagtcctccttaaagaaaaaagggaaaattttttctctttctctctttctttctttttctttttcgtttcttttttttttttttttttttttttaagaaatagtttcccctttggggaggaagaaaagcacatttaaccctaactttgtcctgcttctccatgagctgatttcaaacttcctgaaatcagccaatacttccctttgaaatggatagtgcaggtttaaacagtgggcattctttagcaatcagtttaagaaaacagtgtctaatttcctgtccattcctgcacatttcttagcacatggtagtgtcatttaatatctaagtacagtaatgctgtgctttaacttaagaaaatgcagacaaaccccctgagtgaaataatttgtgtgatctttgaactgaccatgaataaaatcaagcccttactatttgccctttatttatacagtggagaaaacctttgaaacccgaaactctgcaggatatggtatatgcatacagtatgtttcttaaaattatataactctgttgcattttataagtttccccaacttctccagccgccattatacgacgccttccaaatatttaccttagaaatgaatacgattttctaatattattgcattcaggagttgctaaatttccattcagcagacctaattccaccatctgtaaagttctagattttataatacttataagctgtttctaatctatttttactgccttgttctgtcctgaaatgtcaaagagtgcagaataggtcttggaattaacatgacagttaagaaacttggcaaggttttacagcagactgtgacattaacaaaatacaaaggagaatggtgaaattaacattaatgtatgcttgcagacactataaaaatctatatgtccatgatcgtggaattaaaaaataggcatgtttttaggatgatgctattaaagacagatctttactatgaaaggaaatttccatatgaaaagcaacttactaaaagtaatgccataatcccctctctggaatgaacaacaggtttaccgtcctaggtcaagtaggcatatggctgtctctggctgccaattttttttctaggcttctttaatctgtgataaaactgctttgaaagcactaatagcattttttcacagctgtgaaggagatcatatgatacatgtacctagaagggggatcatttgtttagattcacagattgaaaaaataaatcatttaagactcacttttaatttcatcatgggaagatttcaaatagtgctatctagaggaattcttgctgagttttctctctctctctctctctctctctctctctctctctctctctctctctctctctctccctctccctctctccctctctcagcagctgctagaaccagcctgtcctgtcctagttactccttggtgactgtagttgtgtaaactgtaataaccctgaccttgggctgatggacgctgatttaggaacctgcagtcctggcatttgaatcaggccaggctgctggagggcggggtggatggagcctgggactggctctgcaggctcagagcaacaggcactggtcagatcccagactgaggctccactcctgctgtctgggtgatcacaggccagttgcttaacttctctgaatctcaccggaaaatagaggaatcaaaaatacccacctacataggtgggatctgtgaaaggcatgtatgtctacaaagtccctggcacgtagtaccatttatgcgattgtttttgtttttaattggatagtggtgagaatcggggagggtggggatgggggaataaaatcctggcctttgaacacactctgctccctgtggagtcagtgtggctggcatcaaagagcgctttctgctatgaagatctctgatcccgcatgtactctggacccttcccggctgggagggctgagggctgatgtctgggctgccagcccagttctttagcccggcaacttttcacttcaccaccccagcctctgtttatcttcctataaataggtcacaatagtgcctcctagaggctccatgagagtaaagcgagttcttcaacaggaaacacttcaggcctggaaaataatatccagtaaaaaaattaaaagaaagtttaaaaatgcataagcagtggccaggcgccgtggctcatgcctgtaatcccagcactttgggagggcgaggcagatggatgacctgaggtcaggacttcgaaactggcctgagcaacatggtgaaaccctgactctactaaaactataaaattagccaggcatggtagcacatgcctgtaatcccagctactagggaggctgaagaaggagaatcgcttgaaccagggaggcagaggttgcagtaagccaggatggcaccattgcactctagcctgggcaacaagagtgaaactccatcaaaaaataattaataataatgataataataataataatccataagcagtaatgcgttgtttgaagagctgtcttgggggatgtttctatgttgctccctgcacacagcagactggggggatcagtggaggaagcttagctcagctcagttgagagatccatggccctgtgggctgaggagggcctgcctgggattgaagtttcacaggaaaatcacctttgctgcatttcctgaaagtggctcctgaagatcctggtcactcaaaggccatgtgactggcccaggagggtctggtgctgggtaaattctgtttcgaaaccatctggagatccttgcttctgccaaaaagacaccctttccatgtccattccaggctcgagggaacaagccaggtttcccttttgctggacaaagtgctcctagaaaacaggttaaggggatcagcagcagcgtggagagatttggggtttgggtatttggggggccctaggcagcaggcacagtcactaggggatcagaggactgagaggaaaggaggggtcactgtctggagacattgcacattctggtgcactgcatggacaggtgattcctggtgtgtctgggattcctgtggtggccccttttgggagactttatttgggatcctggggtccaggctggggcccctgcagccccaaagggctctgaggagggaccctcgatacatctcacctaggtacccatgaagatgggactacaccaagtttgttgctttagggttgatctagacagaaggtgcctatctgcagacatgccacagacatgcgtgtgcatgctcgcttgctgatcacggctcacctggtctcccaggaggttctgagcttaggcccagccctcccagcagcaggtgcactgcctcccagtctcccatcactcaggatgcttgagctgcttctcatctttgatgaggtggctcaggccctgctgctgggttccttctcacatcagaagctggccgggtccgacacgttccctcctgtccgctcttcttttctccctccctttccctgcctcctccctcccttccactccctcctctcttttctcccctctcctcccatcctctgctggggatcccggcaggcactggctgcactcacgtccttccaccagtagatggcggcctctgcacagaagtggaacccacatttctattactgtttaggctttgagagggggctttctgagcctcaaggtggggtgttctaggaacagctccgggctctgggggtagcagaatcctcagaagcccacacatggggtaaggcgggagctggaaacctcgcggatctagtttcccttgcctcagagctgggacccagaaataccttttaattgctttatttgttttctctgtgtgtatatatataatataaatatacacacaaaatatatatattcaaaaatatatatgtaaaatatatgtatgtgtatatatgtgtgtgtgtgtatatatatatatatatgtatgtatgtatgtatgcatattttaaaagacttattcacattgaaaatccaggatattttacagagcatatcaggcaatttctggaaaagtcagaagttgtggtaaccctgggctcatgtctcctgggccacaggggaaggtgctgagtatcgcctgacccttggggcagctgttctcaggcctaccttggtgtaagctcttgccctacccaattttcccaggaatgcaaactgtgctgtaagctgggccctcttgtctaaactaacctcgttagcatctcgcagtagcacagcaccgaggactaatgactgaacacatgctgtgtgctgtagacctcccgagcaccaggtactgtctccatctgaattcatttacacgcctgaacaggtgtaattatccccagcttacagaaggggaaactgaggctcagaggagcaatcgcctgtcccagtagcagaacaggggtgacttgcacacaggcttgcctggtggaaaagctgggttagtgcctggttggcccttgggtgcagggagggggcacctgcaccctcccacgctatcagcctctccctctgtgtgcgttagctgctttctgtgtccatccgggaggcctcccccatgccgaagctgcctgtgagtgggaaggtgggtggttaggagacctgaaatgccgaagtgtccccaatggcctggatcaaggttaattgaagggactgaccatgactgtgtataaaacaatgtcagaagactctctcagctagagttttttctagctttttttttttttttaattaatgagaagtgaggtaatctcaccttttcagattcccagagtaaatgaagacctacctgctctggaagcccagagcatgtcaggttgtcttggatatagagtacatgaacagctcccagcctatttactacagtactagataacaatagcagagcagtagtgttagtatacactcagcatgtcctgagtgcttgcaatgtgctaagaactatgctgtgaaggtcaaaccctataaggtatacattgttattagcctcatttcatcgatggggaaacgcaggctcagagaggttaagtaacttgtctaaggtcacacagctggtaattggcagggctagatttgaagccaggtcctcagggcactatcctttcaaggaattctatcgaaatggcatgtaattggctctaaaataactggagtgcccttcagaagtgctaactgctccaagttatctggattcttcttggatgttaaatgtaatattagaaaaaaaatttttagttcatgatgatggtcttggccacattttctctctctccaggaaataaatttttgcaaaattaagatatttatttgccctggagactctacaccatgtagagattccacagtgggggctcctgaccttgagtttgaggggagggggtgtgattgactttcttttgcttgctaggacaggtcctgcatccctgggccaatcaggggccccttctagaattttctgcctaatacactgctaaccctgtcccaggccaggctacagttgcttcctggtgtgtctgagtttttgtgtgggggcgccttctgggagcttaaaagctcaggatcttggcggccaatttgagggtccctgcagtcccaaaggacactgaggagggacccttgttatgcctctcccaggtacccgtgaagatggagccaccaaagtttgttaccttagagttgacccagatctgtggtgaggggaagtcggctccagcctctgcgctgcctctctctgctgatggctccctgggggctcggtgtaggtctcctctataaggcgggtcatatttgccacacccacttcgaggccatgtgaaggggccgcgtgggaggtgcccagttcttggctggtggaaaagtcgtttgttgctgtgatcacaggagctcccaactcattccaccttctctaagccagctccgattcctgaggaccacctgtgtgcccaagcctggttggggcgtttctggttaattaggaaagggatcccataccccaaatgcccagaagaaggagccagaggtttagaagggccaggccacggaggagcagctcagcgagggtggtctctgagtgggcagcgggggcaagggttgtcgggggaccccctcacacgcctgggtgcattgtgctcatggtggcccctgcccctggaactatgaatgtggcagtcctggaggcttcctagagcccagctagatcattcctggagggaaggggacagcaggagcaattgtcccaatgccacagtggggcgatgcacaggcggctggcgctccctgtctgtttttggagaggaaatgacacgacctgcagctgggtagactgcctcttgtctggtcgggtctcctccatttctgttcctcacgcgcttccctaaactgggcatctggcaggctcagccgggcagacgtgttccaaggaccactggcatttgtgatggctgagtcctgtgcctgcgggaggggcggcccccatccctcacacactccctttaggcggtgcctggccgtggtcagcttccccggggactcagcctcggtgtccagcctgatgaagaaagaagggacaggctcctggagagtaggggactgccaggccacttccgcaggcaggcggaggggtcccttggcctccctgtcctcagccccggagaatcccactctcctgctgcggggacctgaacttcgggaatcccgagatggccgcaagagggcgcccgatcctcgcagaaggacaaggctccactttccctaaaacctgaaagaagcttgcaggggggctgcgtggggtagagggcaccaactgacaaacacccaattttgctgtctctcagggtgttcggagcaagtatggaaataaaaactgttcctattgttggaaaaaattaaaggagaaaagacctcaggttaaccgctttgttcaatgacgtattcattgtggcaatgtgcacgaatagagcgtctgctgagtgctaggctggaggagttctatgaactagggcggactggattgttcctgcttctacaggagggaagagaacgaagtgggcaaaagagctgagcccagagtcacacagactcacgcctgcatctgcctctctccaaagcagcttttccctttcccctcatcctgcccaggtgggagagggcgggcccgggactcacgggcttcttagcctctggcgcagcatggcgtcttgtggctaggtgccagaagctggcggaaggaggggtacgtgggaggcttagtgcaatgggggaacgaattcctgaggctcctctctcctccccatcccgcccatccctagggcccagcctcaggcttcctctgagactcctcccctcctgcgccgcttctcattcgcttagtgcactgggatcagcatgcctgagttcgaatcccgtcttttgccctcattcgctgagtggccttggaaaactgtggcattcatttgggctgggtgttctgcctgtgaaatccgtggtcacgatgactgcacctgtgtaggacgatcctatagatcagatgagaaaatccatgccaggaaggctgtctgtgggatgcccggcccatggcaagcacctactcaacacgggctgttaatatagtccttgtcatcgttgtcttctcggccttgccaggttggacactgagctcccccgcagacgggtctcggggaatgaactgttcactacgaagtccaaagagagtttcatttggttttgttgggggaggcatttcccaggctcttcctcgtggagtctgagaacagagacagaggccttccttccccagagacgcctttccggactggccccttggtgcctctgttgcccacgcccttcaggcaggttctgaaggcaggagccattcccgggtccatcccttcagcccgggagcctggctctctgctgtatccctgccaggctgtaacagcgagagcacagagaaggtactctgtccactctatcaaatggatgaatgattgcccatttcatggccaagaacattctgctgctctatccaggctcctctccccaccccattctgcccatccctagggcccagcctcaggcttcccctgagactcctcccctccccttctctttctcattcaatcattctttcattttcccgttcactcaatgcacgcacgtgcttctgcatgtgaggctcaccacaagccctagaggaacaaggatgaatgcatcattatcctatctgccagaggatcgccatggtgcaggcccacaggtacctagggggtataactcagcatgggtgttgcccttaggcaaatcatcaatgacccatgttcaggcttgacattggggaaggggtcatgtgtccagtctgaaatctggaggaaattgttaggtgcccgtgacatagttgggggcttcccagccaaaggagtagcatgtgatgatcactggaaaggttggcccagccggggagctgaagggtctgtcctagagcaaatgcagagggtgtggaagcagtgaccagggacaggcctggagagagactgtggccaggtcacggaggccttgtcaactcagcagagatgatggcggcttcatccaagtgactctggggcttcaggggtgcagagcaggaagaactgagggagaaggagaaggggaagcggggcaggggtggaggccccaggtgctgagagggcacagcctcactggagggaggtggctcttcctcagtgaccagaggtgaggaggaggcgggcagtctgcagtgacatggggatatgtctaactagtgtttatagcacctgcgctatctcaggaagcactaggtataaatagatactcagcagacatttgttcagtgacgaacaaacagcctcaacttgggtggttgcaatttcaaaatgcattcttccgaccctgggaggctgccaagatccttgcttggcaagatccctgagaatgtccttctagtcctggtacagctggaaggatctctgggagggtctgtggccattggacttgaggcatcaagacaggcccatcatctacccaggagttcttttctcagtaggactttacggagcgtggtcaccgccctgggacccggcccactcagccaaggctatgtcactcactggggccgtccaggccttcacttgggtcacccgattcccatctcaacgtttctttttccttgctataatattttattcaaaacaagatagattacttggccagagaaactgaacccagacagacagaaaatagcttccccttttattctgcaattcagaacttcttacaaatgatctgccagttggggtgccccatcccctggaggagtctgtgtgtgcagaggggccataattgtgctgatgttatagagacttaagtgaccaccccagggctgccgttgctcaggtgtgtttctggcattcccaagttggtacccttacatgcaatattttacattagaatgcatgcgtttgaaatagcgaattggtgaacatgtaaaccagatgctaagagggctttgagagctagcctgggcacccaattacaaaaggggcattatttccacagcaaagcatatttcagggtccatacagcaaacaaggtcaaatctgaaagatggggtctgcaaacctccatcttctttgtagtgatgttttaatcccattcctctccaatcctagctcaagaatctgttagtaagagcatgggggagaatgatgagaagcctggtttaaaaaacaaacacatcaaattctctgctaccacttatgagttctgtgactttagtcctttgcttggaatcttccagaatcataccctaagataaggatttaggcacaggcagttttttgggaggagggagagaagatcccaggaagtacaaggagggagtggggggagcagatgtaggcgtgttttgaagcaggtgatccctgtgggaaatggagtcttattcctgctgggaccctccgaggaactatgtggacaacctcaagaaagctgcggtgtttataagccagcccctatcctgtcttggttgagtgtattcctggggtgttcaccctttggccctttaatccaataagagcccatgactggagaacccccttggccagaaagccccatatgctttggcatatgtggaaacagcctgcaggagatggcccaggggaatgggtgaggactccagtgcccctgtcacatgagaatcgagcctctccgagcctccgtttcctcatctgcactgtcagctgttccagcccgcctaggacccttccagggtgatctgtatgatctgtgtgacctatgagacatgaaatagtgacagatctgagcagaagccaagcacagcgcctggcccttcaggggcacacatgacatcactgttgtttcatcacttttctgcttggtcttcctctgcctagattccaatatgaattttttcagttcatcttcaaatctctgctctcctctccctgggggaaatcttcattgctccacgctggggtcctgaacccactgaaaacattctctctgtgtctgagaagctgactcagattttccttttgtagacgggtctcccgccctgtgcctgccacgggactggcacatacatcgcccgcacagcaccatggccctggccacccaggcacatcttaaataaaagcaatagtaaaagagtcaagccaaccagccacagccacccttttctcctcctgtggctgaagcctgcagtgcccctaagcctgctatctcgtcacctcttcctgcctctggggcacacatcccaacctaactctcacatgcgtgcccaccaccccaaaccgtgcacggacgcacgtcccgatgtcaggttccccatgtttataggtaaaatattactggtgaccgacacacagcctttttctcctacgttgtcattttatgttaattgaatgctagtgttaatctaatagagtttagatttatgttgggttctgtagcgagtcatattttaatcaatacacattccaacatttagatggacagatgagaaaagcagcttcatctccgcacttgggttccatcagctgtcaataattccccatttgaatccttcagatggtcagatttatgggtttgagtatattgcattcatcacagaaattaacttttggtggaactgatgtgaaagctcacatcacatctccaagaggcagatattgtgtttcagagctgaggcactcggaaatattatctgagaggagcaggttggcggggtgacagcaggagatgggataggggcctgggtggagaaggctttcagggcacagtgctccttaaggcacgtaggcatcactctgtgtcccgtaagcagagctagggctggttctgggcatcctgtgccatgcaccctgtgcccaggctgcccggggatggagagggagtggttgcatagagtcaggtgaaagaggatgctgttcctgccaggtaaaagactgaaagactcttctcttgtggaccttggctggtcctactctcaggttaatttctcaggaagcagagccagagttaagaaatcagggcatccaggtttacttgacatgtgactgatggagtattgggaagggaaggaaaccaatggagtgtatgccctcaatccaggtgggcagttggagttttggggagctctgggacctgaagagcactcctcagagtgaccccacctgagaggtgaggaagctgcctttgtctggtaaattgctgcccatcgtgggtggaggccagcttgagctctaaatatgaactcggaggcactttcagcttgtccagcttgcctctgtagctgggatgtcaataaaagcctcctgtatagtgtgttcttggttggtattcgaggtaggcagctttttgcatttagagatgggagtcaagtagacagggcaggacatgctcagagatggtccttccagccatccccctgtggtcagggagaatgacaccctgctgcttgaacaggtcacgtgggcatcgggctgggctccactgcttacctgcccgccttgtcaaaatcccttccccctgagaaactcctgcagctgaaggtggctgagaggctctgtttccacaactcccaagagacacagataacagtgcagtgctccacgaggctcagtttctctctctggcctcatgttctctggctttcattcctgtagctatctataggacagtgcttattgatcttggaatccgtttgccgcacctctaaggaactggatatgccatttaggctttgggggccattagacacttccacagagatttgtatcagaagtagcaaccactcgtctctgtttctgccatgtaaacaggcaaatggatttgcccttgagtttgctgatgcaagcgttcaaagtgcaatgagcccagagcttctacctgatggacccctcaaaggtgtccgttgctctatggccagtgagcagagacaggtgagaaaggacgctgttcctaacaggtgaaagactgaaagactcttctcctgtggacctcggctggtcctactctcagggcaacttttcaggaagcagaaccagagtttagaaatcaggtcattcaggtttatttgagatgtaacccatggcttatcacgaaaggaaggaaaccaagaaagtgtggattggagaaggagctgggaaggctcacagctgcatgccttgaaatctcatcttgagatgtctgtttctgctttatttccagaggcaaaggtaatgagtgcgcccactctgatttctctgtctcctggcgcccagaaaaaagaggagacattccttgactttccagtctagctattctttcttcagaggagacaaaaagatggctatagagatgacagccctctcagtttctctccatgaaatgagtgatcaagagtgaggtctcatggaaatgcactcttgcttttttattttttatttttgacacagggtctcactctgttgcctaggctggagtgcagttgtgtgatcatagctcactgcagcctcgacctcctaggctcaagtgatcctcccacttcagcctcttacatagcagggactataggcatgagccactacatcaggctaattttttaattttttttaatagagatggggtctctctgtgttgcccaggctggtcttgaactcccggggtcaagagatcctcccttctcccaaagtattgggattacaggtgtgagccacatgtgctgggccagaaatgcacttttgtttttaaacttcaaacactttgggaaattcattgactcttcatgtctttgcatgcagtttattctgggtgctcatgggaaatgatttccttgcctctactgtgagcaagatgaacatgaacctttgtgcataaaacctgaactgtgcccattgagagtctatggccatctgtgaatgtgtaaagaagatggctttcactctgtgagccccttgtcaacattgtaggacaggaagtcacatgcctccatcataggtctgcctcgtgatcacagcattatttgagaacatatctgtatttgcaaaaatccattataactcccttgttgttggggatgcagttaataagtgaaggtaacacaaaatatgatttcaaatcagtttaataaaattattcatgtagattttaaatcatttttacagttgatttaacatttgtgactggtttatagattatgatataggatggtgtttgcatctttgcaattttattccaatttagaaacagtacaaatattaatttttgcttcaataatggagccttagagaattaaacttgtcttttctccacacacattttatgaaaatgattttaatatgattttaaatatatcttttgaggaacttcttgcagggaagccctttgaacagggacttaaatgggagtatcttctcaaaagtttcttttgagacaagggtggacattttatttattttttatggaaatggagtcttgctatgttgcccagcctggtctcaaactcctggcctcatgtgatcctcccacctcggcctcccaaagtgctgggataatagttgtgagccgacacacccagtcaaatattgagtttttaagatattttgcttgtgaaagaaatggcgtgatgccttttctacaattgaagaaagttctgaagcttctagatgtggcttcttaacaattatgagcccaaattaatgtataccttggctcatacctgctgggctgccgcaatctccctggggccaggccagctggatctgtgctgaaaccagacacctggctggtgctcgggagaggttttggcttcacaatcccagcctctgatggttttcttggttacctcaggattacctgcttctcggtttcttattggtgttatacttaagatctcaacagccaggtgaccatgtgcaggcattggagttggccctatcaatttggcctctgaaaggtgccctcctggctattgatgcatctgcagagggcagcacagtgacaaggacagggccctggccacccttggccatccacctggggctgtggccaaggcactttccagctcagcacagtgtgccttggcgaggacattcactgctctccatgcaggatcctggccctcaggcccagagcaaaatgtcccccggggacacaggaaaagctggcggcaggctgacctcttgggtcctgtctagctctgacccctgcatgctgcagatacagataactgcactgtttttgtgaattatatgtaattgtagagactgggataaccaatgactttgatcttttgcgatttttgtctttcctggcatcaagaaaccacttaaaagcctcctaagaccctgagctcataaagcccaagtgaggggtgctgcacgtggcctgccccctctgatttggggggacttggtgatccctgaatgggagtctctgcccaggaaaggaagggctgttagagaggggatggggtgaacgggaggcaccctgatgggcacaggtagcccccagctatcaccctgagccaccgaacttccttccttgggaggagaagaggcagggtttagagacttcttctggccacggttgagaatgtcaaaagcttgagtgttcggtgacagtttatatttaaaagcaaactatttcaagaggatttgggatgagaaattagactgcaaagggtccatgaaaaagcagcatcaagaaacaatcaacaacttgcaagagaagcaagggggtgctgtcttcagggaccggagaagcctccatggtaccacagctttcctcttcaaaaggctgggccgggttatggccgctggctgggagatgctcaggatgcgggacaggttaggggcactgtgtgcagggggattgctcagggtcctcagcaggggtcggagaggctcacggcctttctggtctcccttctgagcctggatatcggtgagaggctccaggagccgagtgcagagccgatccagcccagcctgtgactctggccacaggcagagacctgcacaagctctggcttccctccctccccatcgcccactgtccttcttcaccatcttctctcaggaagcagttacctgtcccagctcagttttcccttctgctcacagcatcttgacagacatggtgggaacccaagacaagagaaggcatgatattgctcttgaaactgcagatcccaggcagatcctggcactggactcctagagccaagcagggagccttgggagaaatcagactatgtctggagcttcctttagaattcctcggagctccttggtacccacccccaagcccccccacacacacctatacccttactgtttaggcttaacttttgctttttgccctctggaaataggtcagttaaatcttcattcaaaataaagagattaaggaggctgagacagaagggtcgcttgaggtcaggaggttgagactgccttgagccaagatagttcactccagcctgggtgacagagtgagactccatcctaaaaagaaatgaataaaataaaataaaagagtagcacgttgttacatagatgacaagtccccagtgaatagctgcaggatccctgcagcccccttcaacaccgagccagccgagacatgagtagattctctcagtggcaacaggtgatttttcttctgtgcagaagacaggggtgaacgggctgcccatccttaaattctgaggccacacagctgcatggaggtcggttcaatacaggctcaggacttcccatatccaggcaccagcccgattttttatttttgaaagttaatccatctgtgcggtggattatcaatagctgctttcccttaaccaccgcttcacagctatctgggatcagagagcaattttggagcccgcagctagatgatggaggtgaggccctgggccgggaaggaagggaaaggagacgcggcagctgagtctttcttggctgcagcagaaacaaggtggctgggggtggcgctcaggaaaccctagggtgtgaggctttagctgctggtgccaggagtaaagcccaccgggctgcctgccagggcctgagggtgcagggctctgtgcagctgtcccctcccctccacgaactgccccctccccacgacttctgggaaacgtcacctctttacatccaggaggcagagcccttggtgtggggcagcagggaagggccagatcctactgtggctgcaggacaacccagcaggaaggtcaaaggcaggtgcgtgtcggctcccggcagtctgcagacttgcttggctgggtcccccagagcctctgagggtctggaattggtagttaacatttaaaactcaagggatttcacataaaaacctgtttctggcttctctggaaaattgagagaaattgcaattctcaacctgttttgcggggagaggggggtcagctctgggcatccagcccacctggcccacatcgggaactggagttacttgccagatgcacaggtgaacgagtttcctgccacctggtcatccatgctgtctttacccagggcctctgtctccactgtacgccctgggaaaaacccaggccaggggagggagggaggggtaagggacactggacaaggttggggtgtgtgctgtgcccaaagaggggtcaggctgagtgggaaaaagactcctgggtctggaggccggagatgacaatcctgcctcctctctgtcacaccggggacaagaaatggggaggcaggggccccatgcacagaccctgctgttccttatctgttctgcaactgtcgtttatgattattatttttattttattttattttattttattattattatactttaagttttagggtacatgtgcacaatgtgcaggttagttacatatgtatatatgtgccatgttggtgtgctgcacccattaactcgtcatttagcattaggtatatctcctaaagctatccctcccccctccccccaccccacaacagtccccagaatgtgatgttccccttcctgtgtccatgtgttctcattgttcaattcccacctatgagtgagaatatgcggtgtttggttttttgttcttgcgatagcttactgagaatgatgatttccaatttcatccatgtccctacaaaggacatgaactcatcattttctgtggctgcatagtattccatgatgtatatgtgccacattttcttaatccagtctatcattgttggacatttgggttggttccaagtctttgttattgtgaatagtgccgcaataaacatacatgtgtatgtgtctttatagcagcatgatttatagtcctttgggtatatacccagtaatgggatggctgggtcaaatggtatttctagttctagatccctgaggaatcgccacactgacttccacaatggctgaactagtttacagtcccaccaacagtgtaaaagtgttcctatttctccacatcctctccagcacctgttgtttcctgactttttaatgatcaccattctaactggtgtgagatggtatctcattgtggttttgatctgcatttctctgatggccagtgatggtgagcattttttcatgtcgttatggaacatctgcctgccaggtgtaccctgcaccccgcccctttctattccccaactttcactacagcccctttccgactttccgaaccccaggggcaaccacacttgatctgggatgaatggctctgtatcctccatggatatggaaagtctgttttaaggaatgagacccgtggagtgggcaggagggtcactgcttagtttgccctgcagcacaggaacccacaagggtcctgactcctggggctttctgcagacctgagcgccaggcctgtgcaaggtgctgaggaggtgtgctaagtttgagtcaacaggcagctgtgcactcctgctggagccagtgtgggagatgttgtggactgaggggcatcacagggggcttcctggaggaggaagcctgtgagctggcggggagtggggtaggaaataggggcgtgcccagcagaaagtgcagcttaagagctctccgcatgaagcgcaggaagtctttccctggtgtccctggcctgctttagctggggcaccagccaagaagctggatggagtcctaagggcccctcctcctagcacttagggcagctctctgcccagcagatactggtggcgttgatcctttctctcctattgtcataatttggattctaggaagccacgctgcagactggtttaccaggcgggaggctggtgccgagcagcctcatttgatgggtcctaattacttaggagcagaagtggctccagtcctccaggtccagttccaccctctggtctctgggtagccccccttccccaatgacatctccgccacgctggagagaacagcccctctggaatccgcaatggtgtcagcccagccaacgtgggctccaacagacgttaattgtgtccctggaggaggcttccctgaagttggggtcactccactgtgtcttccgtaagcgatttgtgcataatcgacagtgcaaatgggaaggaaaaaagggagggcagtcccagcttagcagggtagggggacaagagaaagaggcctgtattgcctttatggcccaggaaggagaacaacgagggaggggcttgcggaccaccaggggccaaaaagctgcatcttcaaatctccaaaccaaggagctcactgggttctgacccagccaggcaaggggatgaaatcttaatggtatctctcgaactctgcaagttttgggtttgcatacagcctgtcctcagtaacccccaagatgaagctgctgcgtgctgaggactcgaggcgaggatgtgtttccccaagaaaggaggaatctataagagacatgatgagatgtaccgttcgaattggtttctctcccagaatatacatttgtgctggtcgcgcgtgcacacagcatacagtgtaattcacacacacgcacacaaatgcacgaccagccgcatcgagattcttggtagaggaccagctctcggatcaagctggcagaaggaggcaattcagatacgacacccctttctttggaagggtgccttccccacctccatccccagggaaaatctgccaaatgggcataatattaagtaacgttggcagggggcagctcacggtccctcctgacgctgcttcctggatctgcagagatggtgtcgttgctttcctgccctccctctctgcctcccctcagcccggaggggaaatgagggatgaagaacggggtggtggcaccctctctcccccaacaccctccatccaggcagcacctctggccccggaggtgccctctccccgggagtggaaagaatcacccgtctctttttggcaccagcaccctcctgaatgccatgagaagctggtgaccttcactctggtctccatgacgacaagatggtatatgtttaattagttcaggcttattttaggaccaattttcttttattttagggcaatgcgagctatgataactgtaagcatgtttacgaggcgcgcgaggcttagctgaaatgtgccaacaattctagtcaaacagatggtgacccctgattcaacttgccctctcattcaattattcagctgtatttaattttcctccgagtgactcacgcgccgtgcctccggctgccctctaggtggcgcgaaagaccacctttatggctgcgaggcagggttgaaagccgggtctcggggaattttctcagcctggccttggctggagaagaggataatgaatttctgcatttgaacaatagtttctgcctaatatcaaatgatgtgaaagggtggaaaagaattgggtcaaattgtatgtgatttgaccatgagctctaagtaatctcctttctaataaaggaatttgaaagaccttccaggcttaatatcctcccaaataatttgtttggagttcaaggagtgttatggtgttagagctgtttctatgattgcggatatgttctgtttgcatttggaaaacctcttctgtttaatttttagtagctgccagcccacctcatctgggactaggaggataacctgagcggattttttttttttctctttttccctctgatggtttctgcctgccttctacgctgtcaaggcttagcagtatttgaaaactggatgtccctgtaaaggggaatgaaattgctcactaaatatcttttcaaagacatgacctttctaatgcaggaaccaaagaagcgtgtggccacacccataataacaacacattggatttctcagaacctttgggaaaggaaacagcctactcaactatcacccactccacttcatcccattctgtaacaccttagacaggaggggctgtaccttagacatgctcaactcacatttcttgtccatcaacatagctaggttaatcagagcaacatggaatcatacctttattcatcaatcagttaagaattcatgcctttagtattgctttttttgatacattaagacaagcttgtaaccgatcactcatatatttttctccaagaatatctctctttagaaatcttcttggaaaattatctatctttcctgtcctgcatttggtcaaaccacaagtaaaagaaccaagatcaacaatgactcacatgtacacacacacacacatatatacatatatatatttgagatggggtctcactctgtcacccaggctcgagtgcaatggtacaatctcggcttactgcaacccctgcctcctgggctcaagtgatcctcccacctcagcctcctgagtaactgggacgacagatgcatgccacaatgcctggctaatttttttgtgtttctggtggagatggggtttcactatgttgcccaggctggcctccaactcctgagctcaagtgatccgcccgccttggcctcccaaagtgctgggattacaggtttgagccaccgcgtcttggcctcacaaaaatcttaatgcataaactgcttctaaagacaacacgtcaactttccatggattcacggtccaggttttggtaaggaagttcactttacctgaaaactcttagttctcatttttgcttaagggcaaaatcatggcaatagaaaggttaaaaccatgtgcaccgatttgattcctggaactccatttttacaggcttggctttggtttgctttcctgctttatcttatccaccgatggcttggttcggtcattctgtgttagaggttctgcatgtaaaccagggaatctttggttcaggcaagggagggggctgttgcttcacagcatgactttataggggctgattgacgcagggggcgggacatgggcagcggtcgggacctgatcccgggctgaacagccaagggcccttaccaagcctccgagggcagatgcagttgcaccctatttatgtctgggacactcaaacttagcctactggggccacttatgttttcagtgcgtcttccagggggttatgtgggagggggttgtctcaattacagctactcaggccacgcaagtgaattgtacttaatacctctgccctctgattagcctaccagattggactcaacagcttcctcagatgatcagagcccccttatccttttggataactttgtgttggtggggggaggggtctttatcaaatcctttggaagaattgggtaaaacaccaaaggggtttgggtgtgtcccatctgagcccttggggtctctggattttctgctctgagggtgcgactgcacccctgtctcccatgcttcatcttccacagggatgcaatgacagtgagtagggggctttagaacaagtcctcgaggtagccccatctgagctgatggagagactctttctggatatctgtgggctcttacagcgggagtgtttttatttgtaggtgtggggtgtgtgtgtgtgcacagacacattcatagaaacaagccttcttgatgctttgcagggaaaccaaactctggtatccccatccagcttggctccttgcaaacagggcccatggaacccagggaggtagagacggaagggatggattgggaggaaaaagtcagggcagcttcaccagggaacacactctgtagccaagtcacgattttaaaaaaataaatgccataaaaatcatggcttctctggacctctggcttcaatatgggatttgtacatattacataatctgtcactatagtactgtatattaaagaaatggccccgtgcagaggcaaccagggggatgggggcaccgtcccagccgctgccgccgtcctcccctccatcatgggctgggacgctgtcagctccaccacctgccccacggtcctgccacgttgctgagatcccaagttactctgcctcctggaacgtcatttgtttttctttgttcggaagacaggctacatgagcatttgcgtgaggccatctgtatctctgcaaagaaataatggagcaaggtagaaaatgtctgggtggggaagaccccagtctgtggcaatggctgaagatggggcaggggccagagaaactttctccagggtgtgatgtctgaatccctgtgcccaggaaagggcctgcacaacttctttgccccttccctctctcacgttctcagcttctgcatttactccccacagctcctttccctccttgcagtcctcatttgcagagttctgtgaagatcattttgggagtgtgagctgtctctagccagctcattctgcagtagcagcgagcaccccccaactcccaggaatcaacccccaacacacacacacacttttttttttcttttgcaaagggccaactctgtttttttcctgaaggtggcagtgaaagaaaaaaaatgactcccttagaagagttaggaattttattacaaaccagatggagccgcgggcatccccgttgtgtgtcccccaccctgtgagtgtgtatgtgtgtgtgcacacccaggggcactgacaatggaagctgcagcccccccaagtggggctcacacagggcgcggtggcctcccctggcaccgtggcaccgtggcccagtggcccagtgccaagtggctgccgtgctcagccagcctgctcttcgtcctccctcttagtcccttaccaagataattgaggatataatggcggggaaggagcccgccggctcccgcgggctgtcaggtatctgcgcgcgtcttcatgtcatccgtcagcattgagctcctctgtcatctctcctcagccttcagcgtcgcacactctcatcgccttcattatctcggctcaggccagccctccccccactccccccatccagtaaatgcatctttgtgcaactctcagtctccgattatgaatcgatgatcatgtggtataagagagatagatggcttttagttccatcctgtctcccctaattgtaaaatattagttacattacactgtgtcttttgattaatggaacttatttggagtagcctatccgatccctcccccttctaaagtcctccactgacttttgagaattgagtgatttcacttaaagcagacaaataggcccttcagcgaggagatagcaagactgtgatactgtgggcaagacaggctgtacagacagagttgtgtattccaaagaaaggcttcagcccggccgggcagacgcggggctgcaaatgcatgcctgggccggggaacttccttcccttctttatttcatcctctttttggcaaatctagcccatcttgctgacttgcaaaacaggatgtgaaacaaaatttaattaaaattaaataaattgcagatttgctacattcccacatgtggctcatgagaaaccagtcaaatctgaactttgatgaattcgagctctcactctactgggctcccttcttagtgtacaggacggggcatcaaaggggcgttctgctgcccacgtccgacacagggagagatatttatctttaaagctgaatttattttacttggcactatttacttaaatatggtccgttgataaagtaagcccttcccatacaaaagggaagtcggtggctaaatctcttattataaataatcactatcagtgtaaactcaaggtcacgttcactttcaacctatgagctcaattaaaaaaggtctatttactgtcgatgtgtataatatctatatgtcagggaaacagggagacttcataaacaaatcaaattttcagcaaagaaaggcattgcagcttaggaatttcagcatgcattttgagggagcactttcaggcctcctgctgtataaaatacacacaaatatttatgtctattttatagaatatgcctagtatttcattctgacctttggatttttttaaaaaaaacttttatttgcatgattcttgaacacactgactattacgtattttctggggacatgctatttcacttaatgcactgggcaaaagattgattttattacgtgtagagaagctgcaaatgttttactttattttttaaaaaagagcataacaatgtgtttatgactgctaaaaaaaaaaaaaaaagggcaggcagcaaaacaaaccaagcctgagtttcaaattcattctgaggattaaacacccagaaaacacggagattagagattggagggctgagccccaccggttcagtccacctcccatctcctgcccagggctgtgcagggggcctcacaagtgtctggagaatcaacatccacatttgttctggattaataactcaggtgcccggatctctccttcccagcacctgagcctcgattttggaatttctgtatttcgttttcatgtgtgttttgagtccttgctttgaggagagtgtgtgcgtgaggactctttgttctgagtgtcaagggacttttgtaaatgtcagctgagtttcggctgctgtgtctaataaacctccttagggcttaagatgcactttctccaaattttcatcagcagcatcactcacttagttatctacatccatcatattttgagagtcttttatagaatattcttaatacagcgtgtgaatgcatattgacaattgttggcacttttatatattccgcgatacacatttatctgttatggatccataatatcaaatgtgtagtaaaaagctatatcaaaaggcagttatcccacatgcataaaacactctcacatggttgctttaattttcttactacagcttttgaaacccccacttaatactgatggactcccatatttcatttaagtgtgtgcctgagaggagctgagttgcttctaaggcgagtgggtagctctggctcttactgggggaaactctgtgttggggctaagctcagagcatgggagcctacacatcaccctggctggccctcctggtagcgctctgggctggagatgtttcacctcctggggactggctgcagagagggtggtctgagcctccagggacctggcctcccctgaataacagcagccaatatttatggccatagcctttgacaatattggcccgctctgctccacattctgtgctgagctctcgatgtgtgtcatccccttagacctggccatccattcggagagaggcactagcctgagcccctttcacagatgagaaaactgaggctttggaaggaaagagggacttgttccaggctacgcagctgttaagagctgaaggtagagagctgtctgcctccaaagctgagaacaaaatgttctccttccttcttgaacctgtctgcctgcatctggaattatttggagctttacgctaacctaacactggatattatcctgttgttttgaagattcaatgagacattgatttgtgtacaatacctgatcacagtaagagctcaaatgccaaaaacatgtccgtctgtgagggcagaggggatgtataggcagcataccctgtccaaacaggaacattttctttcaggaaatgctcattgctgctttcctttttcagttttctaaatcattttgggaggggagagagtttagaaaactcgtttatttgggtaagatttctgatgggttgtggctattcctgggacaatgtgattgtcaggaaatgttatcaaaatgaggagattccctctcaaaggtacatggccctggccttgggaagagacatggatgcacttgtcatgtttggagtgaccagcagggaccaggaccatctgggggcaaatgccttcctgagacagcgttcccgtgtgtcccgtggaacagggagggcaaaagctcctagtgaattataaagtctgctgcatgtgtgagagaagacaatggtggcattaatggtgaaaataaagagaagaataaaaaaacaggtacacaggcttgttcctgaaggctgcaagaaacagaattagattttgttgctagataccagaaagtgaaaatttcagcgtggcttttcatttggcatcatggattttaacaaaataaaataaacatctggttgtttgaatgccagtgaggcaccctctttcccaccaccctgccccctgattcagccaaactgtgtgtgtaaacactgtcttaattgacttcaggttagggaagtctggaaaacaagcttaaattcataaaactggaatggacatccttgaggcctctccaatcatcaaacagtaggtatttatttatcaaccacttactgggcgcacggctttgttaggtatcaatggggaacaaatgccggtaatattggtccaccatcctagaggaggccacatttggggtgaaaagactcttctagcaaaacaaaggtccagtgaagaactaagtcctgttgtagagaaaggggagaaatggggccttctgaggatgggaggggatgccagagaggaagcgatttgaaagggatttgaatccggataattatgctggcgatgagtttggtaaggaagcctcatttagttcacattcaggtcgagtctctctctttctctctgtataaagatgtgtctattttgagactcaggaaagaaatgattctatttgcaaagtagatatttgtttgttgtttattaatcatcacgaacagctttccactggattcactggcactaaatggctgcccttcaaatcttatccttaaagcaggatcttggggttctctggtggttcagagaggaggggtttggagccagaccacttggtttcatacccagctgccccatttcctgcgtcacccaggcacatgactgtctttgcacctcagttttcccgtctgtaaaatggaaggatcgtagtaattgggacttaccttacaatttgtgtaaggactgaatggcacataatcagctgtcccattcttaaaaccaaagtgaggaggatctgataaaaaccactcctcccctgcaaacaacatgatttttgttttccttttggcaatgcttggttttttttctctttcattttagcaaatcattgtagaaggaattttgcagcttgactgaagataccggctaactattgtgagtagtttatagcctggtggtcagtgaggctgctgcttacggtctgagctaggaaaggcagaagaacatgtttctagaggagttaagggctggaggtggggagggagatttgtttgcacagaccagaggcctcccaacaaaatctccaagatctttcaaaagcaaatcagaccgctgaccagctggctgagccggcagagttgagcaggatctttctgtattaaccgtgaggtctgctcaggagaccacctccgctggcccaccccccacatgcacatgaaaaaaggaggcagactttgcatcagggcggtcgtctccagagatctgcggccaggggacaagcccgtccccgctcggatcccaggccagatggaacaggaagatccggatactaaaaatcaacttgtcaccgagacattcctcaactgttaatcaaattggggctgagggtgagggggtgggaataccaaaaggacatcaaagggggtctcacgcccagactccgctccgtttcaaggctctgtaatttgggaaggttgtatgctaaataatttgcgaggctcccaacatgcaggttattgtttgtggacagatggtgcattgcgttttatcgcttttccttctgtgggccctcatatgtgggactgatgtgtattgtgaagtctttgtctccttgctaaaatctctaatctaaaacaggcaatcaagcacagaggcagggcttcagaaggcatcatcagagttttaaaagcaaagaaaaaaaaatggggaggggggaaaccagacatccaactgcagttacgaggcagatgtgtttgcagagaacgtgagaggttattagggtattaaaagtggacaaatgaaagggattcggaagcacagagggagagaaagggccacgctgtggcagtggtgggcacccgggtggtgatgcctagcatcacccctgcctgcagcctctgcccgggcctccacctcccctccagagaccgggggtctttgtctctgcaggcggtcatggccgggcctgggaggccccctctcggatcccaggctgcccttaagagttaaatcatgtggatatacaggaaggaaatgaaatagacgaacttgctcctcttttcttcctacggatttttctttttgattctgaagatagaattactgtttgtaagcatctgaaagtcattagaaaccctgcagtctgtcaggtgccgacgcaagaaactgctgaaaccaaacgggtgcctgcaccgagggctgggaattcatcatgtgctgatgagcagttataataatatatgagcaaatcacaagcattctgcaaattaatcaaatttttttccccttctcccttgtctctgggagagtggctttgcaggcagacgtaggtgaagcagttttactcacagatggtcgctctggcatcagatggaatttatataacagtaattctgattctttgccaaagaggcagcgaacacaccagggagattgtagaaggcaagtcatgtggttttgctgaggttgttgtgggaagtttaaggggggaaatctcaaattttcctctttgcctttactgtttttgcctgaagggccagaaacggaacgccgttctgccatgggcgaaatccgtcacgtcttttctcgcgacttgtgctgaaagagtgcttcgcagctgttgcaactgctggcggtgacagagccccaagactccggctcctggctggctccttacaagatttaaaggggagagggttcagaaggtggccacgctgcacactaggaagaggcagagctgcctcctcgcacgcccacagcgcttacttacccttctgctccctgtggcattgctaaacctataagggcttttcttttgaagtgttttattaaatgaagagtctaacaaccctcactttaattacacacgggctccgtttataattcctctggatttattcaagtagttgaaaacgatggtgcctggtgattaagctgatcatcttagtttagcagctccaaaacctgggggggagagagagagagagagagagagagagtgtgtgtatacgtgtgcagcgtggaggtgctactagtgtgtgcttgcacatggtcgcttgtccctatgcctctccgtgcttcggacaccccccactcattttaaacttctctctcccttgagaaacctcatctcgcatgggacaaagggatacatgagctgaccctcttgggtccacactggatcacaccacaaggtgcccttatccctgctgaaggaaggatgataccaagatggcgtgtagactgcattatgcaatacagtcctgatgctgtgaggtttttttccccctccccctgatgtaaagccctgcccatttgttttggtttacgtgactacagagaaataagtggattagatggaaactttcacatgcttcattgcagctgggtgcggacatctgtcattcctcagccatattctggattatgccagcaagaggatatgcaaagtctgacacctttgattttagagagagccttttatagtggggggagagaagagaagaaaggaggctcatttcctttgtgacttcataaaaaaaaaagaaagacacctctcttctgtgttttattttatttatttatgtctgccacgtgacattagtggcgctccaggatgagggctgagcattgaaaagtttatgcttccatctttcctttttactttgtaattttctattgttcacagtaccaatttgttgaattgggcatgataaaaagtagctattttaaatatatccagtgtgcccatctatatggatatatactgtgggtatggattgcgggtgtctgattcctttatgggaagagagatgtgcgattctttctcacacataaactcacattaatacaatacaacctcactgaattttgatggaatgtgactgctcccgcgacactgtttttggtgagctgctctgcaacccatatggcccccccaacccactgtaggaaatgcactaatgtttttatgaaagatgtgtgcaggtagtgaattatccacagataaccttggatgccagctttcagtggattggatatcgatacacttaaggtgcttcatgctggtggtttcataggttggcccctccccttgtggctttcctggtgccatacagagcacagcacacccttggcacaagccaagttccaatattggcccccctcccacatttaagttgtacaataaaacagaaactacaattaagggctgatgtgttcattttaagcgacacaatggaaaacaggaagtgattgaaccagcagggaccacccacttgtttatttcactgggtgtgtacaagaatgcagttcatctgctgggtgaaaaaacacacaaagcctcacccagtctccctgccccaacctcaaagaaagtgcaatactggctgtttagttgagagtggtacaaagtggagattggaaagtccagggcccacaggcgcctggctggtgatgcctgggaagtaaatgggtgccaggcagcgggaataagtgggacccagctccccagcggctgcctccaggaagatcttgccagacctcctgactttgcaagagaaactggaaatccatgttttaatgtgaaatatttttttaaatgtaacattggcaatgaattacatttttttttaaagaaatagtgttgggggaaaaaaatatgtgggcctgcagcttgtaaccactaggagggtgaatgcatttatgtctacagcagtgatggaatctatggtgcagccacttggcccccatgggggaggcctgtgggcttttggagctcacagtcagggtgggccgtgccatcccagtcccccacagaaagtggtaaggtggagggcaagagtgaggagggcagggcgtggttcttggagatgtgattgggattctgagcttcaatgcaggaaagaggaaaatgcagagctacccagtatgtcaaggtgcacctgagaagccgttcaacactctccaccaacgtggagaatgggaggaagagcgtagtattaatagctgagattggggttactaaagggaccccctggaacacagagcactcagattttcctgctgaggaaaacagcaaggcatggtggggcattccaggtatgaggcacagaccaggtagggacagtgtgcaggggagggtgctccagggtcacctgttaggaggtgtggcctgcacggaggaaggaagccaagtgccaggctctgagcagggtgtgcatagcaaggtggggactcctgtgggctgaacccccagaaagaggtccttcagtaaacaacgtctggttccttatccagtccctactgtgtgcagagcccgccagagggcagcagtttccagcctcctagagccattagcgaacagtgcctgacagaacataattaagtgcctaattgtgtggtgccacagataagtggagctctgcagactgggtcctgagaaccgcttctaggaggagttggggctttggcgggtctcaatggaagaagatgtgggggctggagatgggtgaatttctggtaggaacgacagtgtatagtaggtaagaagggattgcaatttggaaagccaggttaaggaggtgagatactgcagtgagaaatagggagccatggatggctatagaggaggggtgggcacatgtatagccaggatttggggacttgacttggtatggatggtgtggctttcttctgcctggagaggtctcactgttggtctgaggtggactattgacccagtggacttgatggtacccagaagagggtttacagggacagggctggctgtcaccatctctgctaaattccgtgcatccttacagcccatcttattgccaacagggatttcagataactgtgtttagcccaatgttcctaaggagggaagcgagggatattaaatgtgtatcataggtgctgcgtctgctaattttagactccttatttttgccatctctgagtgtcaccctaataatttcacttaatatttaaaaattaattggttaaaaacttaaaaatacacaactctagctttgttttaggaataatatccaactctgattcactagtttttgggatttttgctaaagctgttaacctgaaaagtggtcagcttggttccatttaaaattacctttgaagccggtttaataagcacctctcccccagcccccgcaatgttggagagagaagggaatttctggaggagtgaggtgggccaccagcccctccgctcccggctcccccactccagcacttccaggccagcgccttctctttggtttctcccggcatttctttaaagactaaatgcactcacccagagacaaactctgggtatcattagagtattattatattacacatcgaaaaatcttcaaaaacggaatgtaagttcattgaccctttgaaggttatttaatgataaacataaatgctttcataaaatccgggcaatgatttaaggtccccgatcaatagttgctgttgagtgcacactggcagggcaggccggcttgcctgaccacccaggcgggctgatggctccactcatcagaggagcctgggtaagcaaataaacaggatataaggcaaaatctgtagggcatgcgcaatggcgggggatgaagttgctggggaagggagccacctagaggccaggccccaggaagagtagccctgaagccaacacctggtggggctgagctgggaggcatgggagactctgcaccaccagccagaggctcctctctgctgatgccctgctgaaatctggcgacatctaagctcttatcctaactcaacttgggcctcaagctgcagggagacagcaagacacagtgcaggttgagctccagctgcaggaccatgttctgcctctctctggctttgtggctctggacagatgctgtgctagtccattctcacactgctacaaagatatgatcagagacagggtaatttataaacaaaagaggtctaattgactcatagttctgcatggctgaggaggcctcaggaaacttacagtcatggcgtaaggtaaaggggaagccaggcatgggggcaggtgagagagagagcaagtgggaactgccaaacacttttaaaaccatcagcactcatgagaactccctcactatcaagagaacagcatgggggaaatggtccccatgatccaatcacctcccaccaggtccctgcctcaacacctagggatcgcaattcaagttgagatttggatggggacacagagccaaaccatatcatccaacaaatgggagcccaacccctgatttcagcattggcagaggaatcaaaatgcacatctcccatttgaagttcaaggttaccatgcaatgggcacgtagtaggtggagtattttaatacttacagccttttctagcagacattcatttaactctatgtgctgcactttgtgcttaagcatcaggcctcatctcattgaatcctcacagcaatcctattagggagctattattattattgcacccattttaccgatgagaaaactgagacttagaaaggttaactagctggttcaagagcacacacaaccgataagaggcagatacgttagagccttggtgtctggcttgaaaatctacagtcttcatcactgtgcttgaataatgaaaaatgctgcatgctagcagggcagtggcgatttctcaaaatctgctctgctgccttccctgatccttgggttgcaggcccagcagactgtgtgtgtgccatatgccctccagaagttttcgtgtcaacagaagttaagtattacctgtttggttctgtgactttggaagcatctcttgatgtggggtgttggtttcttcctgttcacagaaaatcaatcaaatccacttttaaataaactttcaaaataaacttttaattttagtatggatttagatttataaaaatgtttcatagacgtgggatgtggtgcttcacgcctgtaatcccagcactgtgggaggccatggcaggcggatcacctgaggtcaactgttcaagaccagcctggccaacatggtgaaacccagtctctactaaaaatacaaaaattagctggacccattggtgcacgcctgtagtcccagctacgcaggatgctgagtctggagaatcacttgaacctgggaggtggacgctgcagtgaactgagactgcgccactgtactccagcctgggtgacagagcaagactcagtctcaaaaaaaaaaaaaaagtttgcatagataatacagagaactctcatagatttcaccgccatttcccactattattaacatcttacattggtagggtatgtttgtcacaattcacgaagcaatattgacacattatttttaaataaagtccatcttgtattcttagtgttttagtttttatccgatgtcctgttctgctccaggataccatattaccttaggtgtcctgtctccttccaccttcctggctgcaacagtttctcacttttcttgtttctgatgaccttgacagtttccaggagtattttgcagaacgtccctcagttgcaatttctcatgtgtagactggggttatggatttagggaaggaagaccacaaaggtaaattaccattctcatcatatcaagtcaagggcacctgctgtcagcctgaccttggtctgctggctgaggtcatgtttgtctggtttctccacggaagttactctcccgtccctttccatactgtactctttggaaggaagtcacttggcacagtccactcttaaggagtagggagatatgctccgtctccttgagcaagaaatagctacaaaattatttggaatgcacaaggcatttgtcaatccttccccctgtatttattgatgcaatcatttatgccagtatgatttgtggatatttattttagactctgggtcataatctgatattatgttgtttactttgttactcaaatggttctacctttgggtatgggggcttcttcagcaagctctgtgctaatctgacacccccactccaccatcaatatgtgggggtttttttttagtactttcttactttctagcactaaataccccgggattattttggtgtatttcctatcccagtcctagaatcagccatttctccaaggagccctggttccctttttttgggagtggtattagaaaccaatgtcaccacttctagaccctctcagctgacagaataaggaaatatatgcttgtgtactaactcctgtatatacacacatctatattataaatatgaagttaagcttgagttcacacagatgtcttcaatccattaccacacagatcaaaatgcacttgtaaaataagtacatttttttttgggtagccttctaaattaaaacccaaatcacaggaaatttgaaacctaaatttatttgtactaaggatattccaaagtgttttagcatctttgatgagatggatgaatatttttttaaaactgaaaacataaattacgtacctgattggaatcattctcgcctatttggaattaggaaatttttttaaactatatgtgcaactgagaaaacggctctctctgtgggcctagtgattctttatgtatatttttacctctctcattgccctgctgagccactgagcctcttgaagctgaaggcaggattgccagggtcctgggctggcatcctcccattttgcagcctcagggtcaaagtggtaaatattcaaaggaagcagcaggtgatggtgaggggcttcaaggtccccaagtgaagaccagccaagcaccctgcaggcctgacccactcatgaacctgttgtaccaccatacccagtggattccccccaggccggcggggcccactctggggagctgaatttctttttcctcctttcctttctctcttctttctctttctctcttttttctctttctttctttcttactttctttctttattcctttctttctttctctccctccctccgcctccctccttctctctccctctttctttctctttccttcctttcttcctccctccctccctgtctctttctttcccttccttcccttctttccttctttcttttctttccttctttcttttctttccttctttctttccttctttctttccttctttctttctttctttctttctttctctctctctctctctttctttctttctctttgtgtctttctttctctccctccctccttccctctccctctttctttctctatccctccttcctccctccctcccccctccttccttccttccttcctcctttcttactttccttccttcctttcttccttctctttttcagagtcttgctctgttgcccaggctgcagtgcactggcactccaaccactcactgcaatctccaactcttgggctcaagtgaccctcctgcctcaggctcccaagtagctgggatcacagatgtgtgccaccatacctggctcattttaaaatttttgtagggatgagggcttattatattgtccaggctggtcttgaattcttggcctccagcaatcctcctgccttggcctcctaaagctgtggaatttcaggcctgagcctcccgtggccctgaatttttaatgtatcctattgacctataagaggtcaatgtatcaaatgtatccaatggtcaaatgtatccaattgacctatagggggatacctttttaatgtatccaactgacctatagtgatgaagacctatagtttcttacctagctgcaggcattgcctaaatgttcctaatttcaaggagttcaggcggcgctggttgtgcagctctgggagaagtgtgttatagggagcccctctgggtgctagtgggcagtggctgttctcaagccttacagccctgtgtgtgggaactgatgcggaggctgcttctctccacttgatcacctgctcccttctaggcaatggcactgtcaaacgtggatgcaggacgcccttctgcagtagagatattttgtgatcccatgctctgaaaatgatgttcctcgtgctcaatgcccagctttgatgggcttctgttcctgtaaggggagtgacatctggtgcatgtgctatatctcactctcacacacacacacacacacacacacacgcaaacacacacagacacacacaaacacaaacacacacacaaacacacagacacagacgcatacaaacacaaacacacatacacaaacacacacagacacacacaaacacaaacacaccaacacacacacagacacacacaaacacaaatacacaaacacaaacacacagacacacccaaacacacacagacacaaaaacacacaaacacacacacagacacaaacacacagaaacacaaacacacaaacacacacagacacacacaaacacacacacagacacaaaaactcacaaacacacagacacacaaacacacagacacacaaacacacacacaaacacacacacatacacatggtacacaccccttcagggggttcatggaccacctcttggagcatctttgactcctaaccagaggcccctctttgtagagactcttccagcaagcaggttgcagtccatggcaggagcaggtggagagacgagcattcttttagagaagacatgaagttgaattcctgatcagtaagcagtaagttccatacgtgtgactttggatgatcatttaatctccctggatcggggatttcatgtctgtaaggtgggaagacatccctctgccatatctccctactgacagtcatgaggaccaactgaggccactcatgctgatgcactttgatgagtgggtgccagaacatgttcaccaatgggcactgtcaccactccaggactaaacaccacagggtggtcacctcttctctccccactctcttaccctctgtcccacacttgaggagaagccatcagtttggaaagtctggaagccccatagacgcagccccctctcttccacaaagccagctgcccacaagtgtggtgctgtaatgaatggatggccctcccaagggcaggcattttctactcccccttaggtgcggcgaaagagcagatatttccatcctagcaagtaagaaaaatatctcgtttccccactttcgttataaacaatgtacgacttgctttctccttactcctcttgaccctccgcactgtatacatatttatatattattcatagtggattaaaaatgaatgtgctctttaccacggctctacggcgcagcgacaatacaaattaacgtatgatgtacttacttttcgcatggcagtgatgggaaatgttgatggcctcaaagtgagaggtagagagaggggaatgaggtggggcgggcagttgggggggcccccatctggccacaccaccagggctctgagccctggataaagatagatggggattgggaacattctgggaactggtgtggcggcagtgctggaaaagtcttcccaattctcttctcccacggaacgagggccaagtttcccggtggatcctgtgtgcctggcccctgttcaccctccccactgagcttcccctgtacctcgctgacctgctcctaggatgctgcactgacccaggcttcctgcttctgtgcctgggctcaggtgtgcccctcagactgcagtagcactgtctctctttcctatctcctggcaacctgtttcattcatctgttcctttgctggaaaaaaatgcttggcggaaatctgtgatgtgccaagcaccgtgctgggtggtgagtaacaacaatcatcaaaaaacccaaacaaccccaaaataaaagctcagtccttgcccccgtggagctgacagtctgcctggtggggaagacagccgtgattgttttatttgttcagcttctgctagcagccagactgaggaagaggcgtgtgctgggatgtgtgtcacagccatggtggcaggcctggggtcatccgggaggccttccccaggcagaggcagctgcatggaggcctggaggatgagtttgcaggagttggatgaagtaggggcaggcagagtccagatcgaggagacgatcagggaggatcgagcaaaggtcccggggcagaaaagagcatgatgcatttggagaacagagagaagtctcctgtggccagagtgcagcaaactatgcaggctttaagggagatgaggaggggggatgctcagaggctcagattcctcctggcaggtgttacgggagctccccatcacttgtacaatatcacagcccgcactgcctcccagtgctgtttgggacctggcccccagccaacttagccctaccttctaaatggggagttccttctggcaagaggcctcacccacatcaaattctatctcacatttgctgaactttctcccagtgaaatgcacctgttaacaacttgttcctttgggctttgaaggtcctccggtttcccagatcccccattcaaatgcctatgccccaaagagagacagtcccttaagctttcatggtgctacctgcggcaggaagcacaggacagtggcacaggaagcacttgctaagtcagtactttcgatgaagaaccaggcagagcttcccctgagtcagcttagatcaacagcaggatgacagcagcagccgtgccaatcaccagcagccgacatcttggagttcttcgtcatttaccaatgtgtcacatgccatcatctgatgctcacagcactcctgtgatatagtgtcagtattattgcatcattatcaaggtgtggaaatggaagccttgagttctagtggttgcccaaggtcagagagagagaagattgaagttcagggtgctagtagcttagcagccttacaaaagagggaagcagtggtaggaacccaagctcctcagtccactggggagaaggagtgccctgaaagtaaagcaaaggtgccagaacaagagagctctgggtcttcctatttgaccaaaggccatcctggagtgtggtgcttcttagcaagttcaacttgggagaggctatcgccttgatgctctctccaatggggagctggcaggagtgggtgttattctcttcagttccgccacaatggaagcctgcttgacccaagtctgtcttaatacttattctgcatcttcaacattgatggacattagcatcttccttacacctctaggaatccccaaatctaggtccagtcaactaagatggcacaggcaacatggctggtcttttgtttcattaaaaagagatagatgggctgggcacagtggttcacgccagtaatcccagcactttgggaggctgaggtgggcggatcacctgaggtcaggagttcgagactaacctgaccaacctggtgaaaccccacctctattaaaaatacaaaaattacccgggcatggtagcaggcacctgtaatcccagctacttgggaggctgaggcaggagaatggcttaaacccgggaggcagaggttgcagtgagctgagatcgtgccattgcactccagcctgggcaacaagagtgagagtccatctcaaaaaaaaaaaaaaaaaaaaaaagagatagatggaagtgagcaggccactgaggggctgccttgtcacctctgggactgcagcggcttctcctctggggatgagatgacctacctccatctagagagatctgacttcttccaaacccacagccccctcagcaggaatgtctcgcggtgttgttccatgggcccctcttgctgctgctgccttcaggagggtctctgctgtcagaaatatgtgaaatccacagggacgtattcagcagagctcagcactttttttttttttttctggagcacttgcttatgttctctgacccaaagccaacagatcccagtcttattatcatcaggggctttcacagggacaaatggtagagagacatttggaactttttatccagatttacttggactcagaaatgtgtcatgtccaacagtactgtgcatagcaacagctttctgtttgggaataaatgttctcatcatcaaaagatcaggctttcagttatatttgattcttgggaaaatataatggcttattccgggcctatcatagcttctcccagtcaacttccccaagggtgggcctttcacttcttcatagaactttcttccacatcagtctcatgggagcctttcagcaaacaactcagaaagatgtgtgtgtgtgtgtgtgtgtgtgtgtctataaacaatattatggatatagaataaaacgcattgtaaattgtgtataaactaacacattatgtgtgtgtgtatgtgtgtttgagcctataaaaacacattttaatcacagtctttgtaataagtttagagaatgagggtgactaagtactttatatccattggaaatttgttttaaagccaaaccttctagattcactgtatctcagctctctcatctgtacaatggagctgatatcatcccttggcaaaattgtccaaagctcaaatatgaggataaacatgcaaaaatgtatgtgaaaaactgtggaatgaaggtcttcagggtctttaggtactatcagtattatctacaaagcttctacttactagatacactgcaagatcaggatttattatgattctagcattgtatagacttctttctacaaatggatatgtgcatagctttagatggatttacatatagatttccatctcacctaagtgaaaatgaaaccaattcaatactaatgttttgaccagtgaagtatccaaatctgccagaattattattatacatttggctattaccaagaaacagagattcaaaatataaccataggataaaatcatgattaatattttaaaatcgattggtggaaaaaaggtactaagtgcttttataccaagttggccaaatcaaaaaggctttcattgcaaataaaggtgatatctgaggtccacattttagtttgccaagaggcacgttgcatcactcctgtggcagtatcatttgtagggagggtggcttccatgtagcataggattcatacgtgaaattattactcagtaatgtgacaatcgaaagtacaatagacagttggctgggcgcggtggctcacgcctgtaatcccagcactttgggatgctgaggcgggtggatcacgaggtcaggagattgagaccatcctggctaacacggtgaaaccccgtctctactaaaaaaaatacaaaaagttagccggtcgtggtggcgggtgcgtgtagtcccagctactcaggaggctgaggcaggagaaaggtgtgaacccgggaggcagagcttgtagtgagccgagatcacaccactgcactgcagcctgtgcaatgagtgaaactctgtctcaaaaaaaaaaaaaaagaaagaaaatacaatagacagttttgctgatgaacaaaaacaactgaagaatggaagaactagtgtcatcctggtaaaccgaggcagatttataaacaatagtgaggtttggtcgctttgtttcatagtgctgctggcctatttggatcatggtaccaagggttttggttttattttttatttttacttactatttggagttctttactcgaaagacttgtcatacgatagtgacattctccatcaataaattattgccatataatgaataaatgaatgacttagccctagctttatctgagccatggtaattaggacagtggccagcctttgtccatgaactgctacagagctgcccttggtagaaacatagaaaatacagtccatttcagagaagctttggccaaagcctcgaaacatttctcaggtttcccggtgtcttgctccttctttatgttgtttgggatgaccttcaattggcttgtaggcctccagctacaaattgggcccgcctttttcttgcttaatagtgtccatttcagagtagctcgaactctctctcagtgagtcctgggcatagcttcgggcccacagggatgataacttaaaaaattggatggctgaatcttgggggctctgtgttgtctctaagatgcttggccaggacgatctacttggaactcactcatgcccagcttagtcctgacttagattcaccattaaggtacggagaatgggtgtggctttgcccatcccattgcctctgattggcatcctaattccatccttcagtctatgccctaactcccaggtcatgaagaacagggaccatttgcatttttttgtataatcgaaaatttgcattggaaatatgtcccagttgtccttcgcctcccaacccagggccttccctaggtgaccaagcccttaaggtgaaaagggtggcaagacagcaaatgggcagtcaccctggggactccttctcttacctggcaatcatggcactggcccctcgtgctagctgtgctcttcctcctgtggttggctgtcaggaagggccaacagcaagtgcactgttcttgtactttattttgttcttaactccgaagtctgtagatttgcacattgtcttcttgaagtgggaaggttgatgaaatttagccttgtcttagggacaacagtagaaacagaagaagcagaagcactatccaaaaatgtgtaattcctggcagggcatggtggctcacgtctgtaatcccagcactttgggaggccaaagtgggtggatcacctgaggtcaggagtttgagaccagcctggccaacatggagaaaccccatctctactaaaaatacaaaaattagctgggcatggtggcttatgcctgtaattccagctactcggggagtctaaggcgggagaatcacttgaacccaggaggcagaggttgcagtaagctgagatcatgccactgcattgcagcctgggtaacagagtgagactccatcaaaaaaaaaaaaaaaagaaaatccaaaaatgtataattccttagaaaaaggcaaggtgatacaagaatataattaataattcctgactacctgctttgtgccaggcactgggcttggcattcataacactgagatggtcatggttcttgccccaggaattcacggcctttttgggaggaccagtacatacactcaggcccacaaagcaggcatcctgctgatcaaagcctgaatagagaagtgggtttgagcctgcagagaatgaagtggcatttcagagagagggtagacaagcaagggtatggagacactgcacagtgacgtctatgtgcagagaccatctgaggtttggtttggtgtgggcaaaaggggttgtgctgtagcgtggaatggaagggtgttttaggattgagccatgaaagtcctgattattcctttggaggccagtggccatgaaagatctggggcaaataaatcacaggctgagcttctgctttaggcactcgctctgttgtccctggggaggacaggctggcggtgggaaactggaagcatgaaggccacccgcgggctgccatgttcatagtctagacaataattggtacacactggacctggttctgaagtcagcattgcaaaggaaaagattcaacaggtagaatggattagtcctggacaccagttggttatgagggaacaaagaggcagtgaactccagaagcccaacaagaagcaagaatttagcactgggtgcaattcagtgggaaagtgagcttctgcttccaacgttgcattggattcctgtttctcaggaacaagactgttttgctaaatagacgcaggactgctattactgctttagaaaaagtgctgaatatgtgtttgcttgttctctggagccagtgatggggctctccatttatttacttgtttatttttttgagcaaatgaaacccagctctgggccctgacctctctgagtgctgggtgaaacagcacatgagagcttccaggaacggctcatcaacagcttcccggaagcaggggagatgccattgcttcagaataacttccccagccagatgttttaccagttcctcgagatggtagagtctgtgcatggctgtgacgcatcagggtagagatgttgcgcttggaggattaggtgaacgtccacaggaatccacctcctgttccaaattacagtctttctaggaaggtttcatttcaagagtcactattcaaaatctaccttctttaaaactcatgctggccttgattacctgttcatctttctcctggtcccgacaactttcgctgctgcccctgagaccctcagactctagaaatccccccagctcagcccttccaactctgcctaagagcaagactcaggtgacacccctcactcaccccacccccaaacacacgctcccttgccattcttggtttgctcaacaataaagagtcaacgggaggatcagaacatgagctggctttgccctgaggcctgagtcagactcccagatggaaggatttatggtctttgtgcagaattggggtcagcaaagtgtagctcgtggacaaaatctaactattgcctggttttttgtttgtttgtttgttctttgtgtttgtgaaagggtcttgcttgttgtccaggctgtagtgcactggtaccatcatagctcactgcagcctcaaacacctggctcaagtgatcctcctgcctaagcctcctgagtagctgggaccacaggcatgtccctggctaatttttaaattttttttgtacagacagtctcaccatgttgcccaggctgatctcaaactcctgggctcaaacgactgacttgcctcagcctcccaaagtgttgggattccaggcgtgagccactgtgtccagcaattgtttgtttttatacagcctgtgagctaggaatggtttttccatttttttaatgtttaggaaaaaaactcaaatgagaataatagtagttcatcccacatgaaatttatataaaatttaaatttcagtgtccataaataaagttttgaatttcatcaataaaaagttgaggaatatttgtttcctgtcttgttctctaaatacctacacagtatcttggattttgcctctttgcctgcaaatctgggactatttattatttaaccctttatagaaaaaaattcagatatggggagacttatcttcaattacctagaaagtctgggttcaaaactctagctagagcctggtgtggtggcttgcacctgtaatctcagctacttaagaggttgaaaagagagggtcccttgaggcaggagctcgagaccagcctaggcaacatagcgagatcctgtctctaaaacaaacaaacaaaattgctgggcattgtggtgtacctgtagtcccagctactctggaggctaaggcgggaggatggcttgagcccaggagtttgaggctgcagtgagatataatcgcaccactgcactcccagcctgagatgaggaacgggacttgatctctaaaaacaacaacaaaaatattcagggatgggaagatcttctaaatcttagcttatgtgcctgatgtatcggctgcttttctcactctcactatttgatttttgcaaagtaataataatattgatcatactggtgattgcaattatgatcctttgagccctgggggccaggaaggtgtgagcaacagtgctgaccggccactctttctgcccacaggtcacaggcctttccagtgccgctactgtccctacagtgcctctcagaaggggaacctgaagacccatgtcctctgcgtccatcgcatgccttttgacaacagccagtatcccgaccgcaggttcaagcgctccagggtcgactcagaggcttctgggaatttcgaggagcctacagctgtcaaggcggggagctctgcagacctcacggaagagggcggcaagggccaggaggagaccaactgagcagaccaacctgtatattgcaatagtattttacacagttttaacattatgcatctggtaaaagtttgctaactgcattccaaggggaaaaaatcatgtacaaccccccaatagtgtatagaacatttaaaaaattttaaaagatatctatatatatattaaaaaaaaaaaattccccagcccttgaaaatggctgctaaactgttacccggcaacaagtacttccaaaacaatgcaggtgggagaaaagtgatttcaaaaattcttggtgccctctgagctggagagagctgggggcccttccaactcgaaagtcgtctttgtccaaaaataatgctcttaactgaaaaacgataccatctaaacgatttagtgttgcgttgaagatggaggggctgtgttttcgttgttgaaaacacctctataatctgacaccagctgctgtaattcgcctagaaccctaatgagatgtgtcgggaggcagctgcggtgccagtcagactggagcggtcactgcagagaaaatcaattcacgtggtgttgtaactgcactcttggagaaaccttagacggcccgcagccagcgccggggctgaccggcactgcagaggattgagatcttaaatgcgcatttttacaaaatacacagccaaatgaaatcaatgatcaggaagtgtctgcagacaaatgtccattgcaggtttgatgagtaattcctttttttagatcaaattgttctcggtagccttttcttcttttttaaaaaaaaattttggatgaagaaggaagttgctattaaaaaaaagtagggtacattatataaaatgttgttagaaaaactagctaaccccatccatagaagatgctggtgagcaattaaaatttaggtaataatagaaagatttttttactatgatttttaaaattttacttgaatgaaggctgctccggtccttattatcggattttttttcatgtgttggtttttataagtgtcacagacatgaagcaagattttcttctccagcaagctcttatgaaatagcttgtattaaaatatgatctaaacatcgtgctctctatctctaatgacgaaaactgtttgagttaaaaatgtctgtttttgtaaaacaaatgtgttctatatttttgtagattttagattttctactgattggatactccaaatttatcaagttctgcaccacacagaaggagattttgagtgtcaataatgaaacacttaactcattaaaaaaatgatttaagaagactagttaaaggtttattcttgaatctgctagcatggtgtaaagttgagccttttaacatacttcctttgagtgacatgaaattggtgctgttgcttgtggtggtagagaagtatgaaagtattaacttcttctaaaacaaaatcattcagacttaaaaaaaaaaaaaaggtcaatatttccttgcaggctgggagcacagattaaaccccagggccttaaaaacttcagctctgcctacagcagtttacaaaaatactaaactgcaatcaatgtaaataaaattcttagtgctatcctgagaccagaaagaatctcaggctaataaggaatccggtttgcatatgctgtcaaaagggtgtcatctaaccgaggtttcagtgtaaatgaggtcgctgtgcaacttggacccatctggcatagagcaagctgctttcttgtttttctagtatagttctcactgccttacttaaatcgagttgataaacttaatgcaactgtttctatgatcctagagaaaggactgaaatgttattgaaaactttccgactgtagtaagctttaggattttgactgcactactgtgtttggtgactgtgccagtcccttgctttctgtgtttgctctgcctttggtatcttagcaaagaaaaataaaaaaagaaaaaaaaaacataaaaaaaaaagaaaaaagaaaaaaaagaggaaaaaaaagtgggggaaaaaatgagagccacattccatttctagcactttgggagctctttcagtatttttttgtgtcttttcagcatcctcagatgcgacaggcaataattctgtttgtgacactgggaacatcccctcttctttgtggtgtgtgttgattccattttgtccagtgctgctgtccttcctccccctctgacacaggccttctttccagaacatttgtaacttgtaatacaaacaagtgacagccacagtgatgcagcgtcagtttctgaatgtcatcaggttctcatatctaaacatgtcaagttttttccctgtaacttctgtagtctgtgatgctggtcataatactgtctacattcctacgcaaagaaaaaaaaatctatcttggaggaaatctgagatcaataggagtagaggattttgttgctatgcttgtaacaagtagaaaactttgtatttaaagtttattcttggtcattatttattattataatacatcagttgacagaactttattctggtatagaaagtattaaaagttgttttttcagcaatgactgttttctttctgctgttagaataaaatgtctttgaagcagcccagttttatccagtgttttacgcaataaaacctctacctctgggaaaaaaaatcacatcttttcctactcgcttatgtttactaggaggagtaaaacatatttttgcaggtttgtcagactttggcaagacgttgtcaaactccatgtataaaaagccctgtactgggcagggcgtggtggctcacacctgtaattccagccctttgggaggtggatcatctaaggtcaggagttcaagaccagcctggccaatatggcaaaaccccatctctactaaaaagacacaaaattggcatgggtcaagcctgtaatcccagcactttgggaggctgaggcgggcggatcacctgaggtcaggagctcgagaccagcctggccaacatggtaaaaccctgtctctactaaaaataacaaaaattacctgggcatggtggtgcgtgcctgcagtcctagctacttgggaggctgaggcaggaggatcgctcaaacccgggaggaggaggttgcagttagccgagatggtgccattgcactccagcctgggcgacagagggagactctgcctcgcacaaaacaaaacagaacaaaaaggccggtagggtcctgcagtactaatggtcctctcaggcctgtgctttttcaagctgagtcaacctctatgccgcatacatagtgtgtgagtggggatgtgtgtgtgtgtgtgtgtgtgtgtgtgcacatgcatatgtgaactatgcttctttaaatgtttgcagacatgtggttcagtaaggtaaagtctatggaaatactaatgctcttcatattacagtaattatataaggcacttagagcattgggatctattattttcctttactggtagaaagtcttttttttttaagtcattaaatgcaagggagtcttttacgtccatattattggaggataatcggaattcttcctctagaagaaaaggaaaagagcaaaggatgacaaagtgtctggtagcaggggctactgtgaacgcagagctccgacacggagttgagagggtttgaagtgcgtgctcaacccaggatgtgaagagcttctttttgatttgttttgttgttttattttggtctcaaaacaagctaggatagtgcatattctatatccagatagttctggaatatggagggcccactgaaatgtcacaagcaaagacagctgccaaattgtatagaaatttgtctgtttaccatgtttctttcagggtgtgagactgtgtccttgggtgggagcagatgacttaaacggaatcatcgtcagttctaaccgtctgctgttatgaatatcaaaggtgagttaaggggttgtagtgaggaggtcaggaagtaaacccatgagggagagaagactggaatgcagaaggttgagttagggattctaacatctacccacaccacgtccatgatgcagctcaaacccaccagagccacacaagacaccagagtggcgagaggagagttggaacaatcagggcttaagtgggttgcacagcacgccactctgatgggagggggtgccgtgagatctcagtaactgcacatcattgccaagaggaaggtgacattaaattttctgagttttcaaggtgtactggacacctggattttgtattaagtcttccagtttttccctgttggctcaaaatttatttttaaaaaccacgtatgaatgaatgaacagaatgtgttaccaccaaagaatggaatattattctgccatagaaaagaacctgagatgtggtacaacatggatgaacctagaaaacagtgagagaagccaattacaaaaggttgcatatgatagaattccatttacatgaaatgtctagaatagtcaaatccacagagacaaaagtggattagtgcttaccagggatgagggggaggagagaatgaacagtgacagctaatgagtatgaggtttctttttgaggtggtaaaagtgtcctaaaattagatagttatggtggctgtccttggtgtcacttggtgtatatgctaaaaaacactaaatcgtgcactttaaaagagtgaattttatagtatgtgaattatatctcaattaagctcttacaaaaaataaaactgtgagtaggaggcatttttaagaggtaacaatatatatttccatcaatacattgctgagttctcatacagccatagataattgacagattagtatagtacaaataatataaaatttggggtgtaatggcttaaatttgaaccctagctttattacttactggatgcatgatggtcttgaacaattttttttttgagacagtgtctcactctgtcacccaggctggagtgctgtcgcaccatcacagccctctgaagccttgaactctaaggcttaaccaatcctttcgcctcagcctcctgagtagctgggaccacgggtgcatgccaccatgcccagttagtttttaaatttttatcgagatgaggtcttgctatgttgcccactctggtcttgaaatcctgtgctcaaaggatcctcctgcctctgcctcccaaagtgctgggattataggcgtaagccaatcttgagcaatttaactcttctcagctcattgatagtatctgtaaaattatgacaattaagtgctgtacatagggaaatcatatgcacatttcgtgaagtactctacaaatgctaggtattgtgatcattgtggcataatgaattatggatgaatttaagattaatgtcacatgcacaaaaagctagaccttgataaaatccccatgctttgtaaaggtcccctcatggtcaggtggctgggattccccacgtccatccccttcagaaaagatgaccctagacaaagatcttcaactgctgttttctaatttcctcatttgaaaaatctgagtattaacaactctcttgtcactcacaggggtagtagcaaggtggctggtgaaaagggatggatgcaatgggaaaaagattagtctcagtggtagatgttattccactcacttgtttaacacatatttacagaagacctactgtgttctaggcattgggtcacgggccagagagagatatattggtaagttagggatcatgtccagagatcactgtcttaaggggaaaacagattttgatttcataatcacacaaataaatataaactgtctggaagaggagattcaaggagaacagtaattccccatgcgatggaagctgatgatttgctgagggatgcaggagggagggccaggcagtggaagcagtgcaaagccaatgttcagtgcagacaggactctcaagtcctgtcttggcctctcaggagctgtgtggccctgctagatcgttccatttccctaaatcggctgctcctctataaagtggaacatcgcagtgccaacagcaaagactctttctgaggttaaatgagatagtacatgtaacagctatggagagaacaagctagacactgccatattcaaaggacagttctcaaaagtgacagtgtctggaaacccatgaggacacggaaatggcgatgcctgctgcagaccatggctttctcatcctcatcgccaagggccaacatagtgtgagccacatgacttctgcagcacgttacctctcacatcccgatgcctcatgcccttaggaaggagtgggtgaaagtgtcctggggccaattcagggtctctatggctctgtccatgggcgtggccaccctgaagcagcatagtttgctggaagtgtttctagagggtgatcaaccatcctggtttccctgggactgaggggtttcccaggacatagtaattttagtgctaaaaccagggtagtcctggacaaacacaaatattccccctaggtctaagctggcttcctttaaaagcacgtgtcttgttttggccaagccgaggttatggctgtccctgagctgggaggccagtgtgaggcccggtgtgaaggggaagccatggctccagggggcccatagtatgggctttggcactgggagacttggattcaaagctttcctgccacagcatctttaccacaaagatgaaagtgacacagtacccaaaatacttagcgtggcacctggcacgtgggcattattttatccattctcattgagtgactgaatgaatctttgttcctccttcttacccaggtgggaaatggctcaaatatgaatttcttttcctagcagctagaagcttctgagctgccgatatctggcattaagatgctcttttgtgctgaaacttttataaagacgataaccctgctgtctcctgtagtttgggatttgcgcacttccccctctctgtttaacatctgtattgtaacagtatattacgaaaacctcacctggtgtattgtaagcacaatcccaaggaaattagtattaaatattgtgatcttcatttcaagatagaagggctgggcacgttccaccaaactggaggtatgtttccatagggaaggagaaaaattcatggtgtaatacaatattaaaaatgtcacccagctgagcattccatgtagaagcttgtgtagagttttaatctcttcacctgttggtgctaagagaaaagagagagttggggtgggggagggagaccgggagggagaggaagggcttatgagaacagggaaatcacaagcaaagaggagggggaaaatttaaatgatcccagaccaaactgttttgctgttaatacagaaatacagtgcaagacacatttaatgggctctattttttattatactatgctgaataattaactttgaggctaagtgtcacatggatttatcttttaattaaaaaagcatggttcacgcatatttgagtggtagtccaaataaatgcaatatagaaatttatgtttgtttatctaggtgttaattacctagagattgtcctggattacttctttttataaagtgtcataggctcgtgtcagaacgaataaagcttggccgtggaaccttatcaatttgctaactatagtgccggtctgacctgagcagggagggcaggggaaaactttggggcttgttatgtatacacacgcccgcattcaacccacagcaaataaaatagtcgttttagaaaatattcctaggacataaaggcacaaatatatcttcattgttttacagcctcttgtccacagctatttataaaacatgtgattatttatgcgttgggttatgagaagttcgctgggagaggctgtgaaggaggctctatcaatccagttacctggtgccctggagaggtggagggagggcttcccagtggaaactgggctgggacaggaagttggctactgtgatttgtctaacatgtgtcaacctcccggctgctcccagaaaagccagacagagggatgacaaagttgagggttagaggtcacattaaaaaaaaaaaatcatgaatgcacactgagaaagtgaaaccagaagcccctaaaaattgttcatcataccttgaggcagcccctgcctttttctttgtttacaaagtgattttggggtggcagtttcagttaaatggtttggaagaaaccgagggttttggccaaaaggttctactttaaagaaatagattttgtaagggcaagaagaattccagacagagctgggagtgtctaagttgggtgcccgcttttgttggggaagtttgtttcccttgggttttctgccttgcttgtcttctttttcctacgcaccacacctccatttttggcaatcagataccagaaaatcaatacaagtaactgcgggtccctgtgggctgcacccggctggatggactgttctcctggggttcaggaaagcctaggggagacaggcactggtattcaactgtgctcgcttctctccagctggagccgaggggagccatcgagacccctaaacagcaaactctcctaccgtggaagctctctgctgggtagggtttcattttcattttgtgtttccttcctcttggagcccgtgcgggctggtggggcggctcactgtcagctccgtgatcccgcgcttggccgcgcgcctggagaggtgcgcccgggccaggagcagagcagggcgcggcgccaggcgggggcgcccggggcctgcgtgtcgtcgcgggtgggggcgggtgtcctcgggcgcgcacccgctgcggcctccggctctggaccagcccggtggctccaagggatcaaagcgaaaaacagctttggccgcaaagggagaacgccctgagccagctcgtccctaaggactcgtcttttggcgaggaaggggacgcctaggcccgtatggggcgcgctgtggcctgggccaccgccgagggcgcgtgggtcctgcgcggcgcctgctgttcactgcattactcggacaaggatcagagcctctttatcttttaaattattaacacttaactgttttcctccccaaatcgctgcccatttcctccccaggatcactgcctttatcagaaattgggcccggcagcactggggcgtgaggtggaggcaccgctgggaggagctgggcaatcttttgtgcttgagtcatgccagatactgtgctgggtgctggggacgcggcgaggacaggagaggagggtccctgtgtcctcttgtgccccctgcccagtcacagcagaattcaacaaatgaggcgattccagagcagacagagctttagaaagtgggggtcaattaatgctcaaagaaggcccttagtgctgagctctgagaagcacttgctggctgccagcagatgccccgaagccttgttccaaaagagagacctgaaccaagaggggagtgggaggtctgggctttagaggtggtcaagcaagggaccccacagggctttggaaaagaggctattgggctggaaatgacacagaagagtccacatggccatgtgatattggaatatcagggtttttttttttaattaattaagctgaaattcacataacataaaattaactattttaaagtatacaattcagtggcatttagtacattttaagttcctattttcattaccccaaaagaaaaccccaggccaggtgcggtggctgacgcctgtaattccagcactttgggaggccgagtcaggtggatcacttgaggtcaggagttcaaaaccagcctgaccaacatggtgaaaccccgtcttttttaaaaatataaaaaacttagctgggcgttgtggtgggcacctctaatcccagatactcaagagtctgaggcaggagaatcgcttgaaccctggaggcagaggttgcagagatcacatcactgcactccagcctgggtgacagagtgagactccgtctcagaaaaatatttgaaaagaaaggaaaaccccaaacctgttcagcagttattccccattccccacttctccccagcccctggcagccaccacccagctttctgtctgtacagatttactgattctggatattttatatatgtggcatcctacattatgtgaccttctgtgtctggcttctttcactcagcatcatgtttttgtggtccagccacttggtagcatgtatcagaatggcattccttttctgttttgttttgttttttgaaacagggccatgttctctcacccaggctggagggcagtggtacatcttggctcactgcaacctccacctcctgggctcaagtcatccttccacttcagcatcctgagtaactgggactacaggtgcgtgccactacactcggctaattctttttgtttttttgtagttttttagagaaggggcttcaccatgttgcccaggctggtctcgaactcctgggctcaagcaatccacctgcttcggcctcccaaagtgctgggattacaggcatgagccactgtgcctggcctgtcattctttttatggcctgcatcagaggccctacgtgctctggccttgccaatctctccaaccacctttttctcttcccctctaggtacccaatttctttcttctttatggtagtaatcactacctggaaataccttgcttacccctttctttaactgctcatggtctaccttccttatgagaatgtaagctccctgagagcagggccctcagctgggggttgtttgtaacaaccgtgttacaaacagtgtctattaacagcacgtaggacctcaaataaatagatattgaataaataaaaattcccagcacaattttctttgataataatcactagatttttatgggaatgttgttagcttaaaaaaaaaatgggccaggcacggtggctctcctgtaatcccagcacttcaggaggctgagacgggcagattgcctgagctcaggagttcacgaccagcctgggcaatatggtgaaaccccatctctcctaaaatacaaaaagttagccgggcatggcggcgttcacctgtagtcccagctactcaggaggctgaggcaggagaatagcttgaacccgggaggcagaggtagcagtgagccgatattgcgccactgcactccaacctgggcaacagacagagactctgtttaaaaaaaaaaaaaaaaaaaaaagagctccttctgcagtcttcagaaaagtgacccccaacaaagagtaatattgactagactccacagcagaccggcagtgttttggagaacttaggcgtggtcccgtttgcctttagtatgggctgtgtctgcatgtggagggaaggcctggcaaagcaagactgacggcccccttcgcgccaggattgtctaagaccagctccctacagagggacttgtggctgcaaatgggaaacttggatccagtccaaatctactctacgaggcacatccctccttctctctgcacttcagtttcctcatctataagagaagctgtgagcatctgcagcacaggcttactgcgggcagcaagtaagaccatggaaaagtgctttccaattggaaatgcccccacacaatcgttaatgtttaaaaaaccttgtgcaccctgcccatgcccagttgtgggcagggataacagagccagcggcttggccagggtctgctgcagccaccccaggtccctctcccaacccattgaccctggccaccctccagcctgcgagcctggggtcaatgcctcctcttaatgccttgccatttcttagtttgctgactggggtgattttcggtgaggtccacataaatacttcaaaaataattcatgatgaagaggaacgcttctggaatggatgatggcacgacaaattaaacgctttgtagggccaagcgtaaattattttaatgcatgtaatagatccgcccagggagacttgagcccctctcggtcatgcctctgtgcccccagggcctggagggtggtgggagcaggtggctgggagcctgttctgctggggtgtgaatcatttccttctccaaagacctattcccccagcacttaggtcctcctaacctgaggagagaatgggaatgtgtcgatgtctggccaggcggaggcaggaaccaggagacagatgaggcagtgtaagagcatttgttagccatgacgacggcctgacccacaccctgccttccattcattgtctgcccctctggagggggagtgaggaatgctgctgtgtggcaccagacatttaaaatattttgtttcccttgaaaatgtttggcagcaagactaatgtcccagttgaggccatcaacaagccatgttttacatttggacttattttatgggagtgcgggaaggaaagagaggcgattatgtccgacaaacccattccacagaagagaatgctgagagcccagaaaagctcaagatgttgagtttccagacatagaaaataaacacacttgttatatcaaaaaggctatctatgtaatattcaccaaatgatatctaaagattgttgtggtggttccataaatactgaagtaggcttgtaatcccagaggaaagaattcattgattccagaatgtgctcccgtgacccccatggtcaggcagagcatgggaatagtgcttgtggttgttgatcagttatcgcatatctggagagaagctttcgttcactcaacatttaatgaccatgcgctagttccggggtcgtgtgcagggcattggaggtacaacaggagcaatgcatgggccctgctctcaggaaactcatgactgcttgatgacctcaggaaagactcaagtcagaaatgctgcagtaactttggccaggcaccgtggctcatacctgtaatcccagcattttgggaggccgagttgggcagatcacctgaggtcaggagttcgagaccaggctggccaacagggcgaaactccatctctacaaaaatacaaaaattagcagggtgtggtggcacatgcctgtaatgctagctgctcgggaggtgggggcatgagaatgagaatcacttgaatccagaaggcagaggttgtagtgagctgagatggcaccactgcactccagcctgggtgacagagtgagactctgtctcaaaaagaaagaaataaaaagaaagaaagaaaaagaaagaaagaaagaaagaaagaaagaaagaaagaaagagagagaaaagaaagaaagaaagaaagaaagaaagaaagaaagagctacagtaacgcatgcaatgcgaagccctgaattctgggatgagtctccttccacagattgctccttaatgtcctgtccatctgcatctgaaatcccactctcatgatcccatcacatgcatcaatgttggtgagattgcgcataagagtagtgggaatggaacatttaaaaagagcaaccccttgcaaggaaagtattatgggtgaggtaatgggccctgcatgaagaataggatttggatgtgagggggtgagagagagagagtacctgagaaggttccagaaggaagagtaaatgtgctccggaccagagatccaaaggtccctggtggcttctgcatccagcaagcaggccaggaagcctggaacctgaagcccagaatgcggggatgtgtggacagaatgtctgtgttccctgacctcaagttcatacactgtcctcacccgcaatgtgatggtaagaggcagggcctctgggggcgagtgggtcatgaaggtggacccctcatgcatgggattggtgcccttataaaacagaccccagacagctatctcacccttttttcctaccaagtgaagacaaattgagaagacagccacttgtgaaggaggaggtagaccctcaccaagactgaccgggctggcaccctgatctgacttccagcctccagaagggtaagaaatacatttctgttatttataagcccccaggctatggtactctgtgacagccgtccaaaaggacgaagccagaggttgagggataaagttcctataggcagctatgcacagggtggtcccactgtgtttcctaaatattttttattgtcatgcaggtcagggtgggactgacagattctatcactgaaagaagctagagtgacttgtggtgaactaaatcatgctctacccaaaaggactttcaaatgaaaattaacattgcaacccacagaaagaaggaagcttctgagacagttgatgattactgtctgttcctggtataaaattagcatcatctcctcagtaagccttctgtacccatccctggtcaataattattttcctctttgtaagcccaaagcacctctctctgggtaagagtgtggaactccctgtagcatgtcagggctggttgtgtttttctactcctcgactggagtgggtcatttgaaggcagcagccttggctcatttctggatccatggtgacccatgatgggagcttcttgtatgctttatgttccatgttgacaaataaatcagtgcaaaggtagagtgatgtccacagaaccagtttcaaacccagccttcctgaattttagtttaacaggactacaatttcccctatgaagttcctggaaagaaaccactcaatccactaaaaatatagttggctcctggagggcatgcttattcaaagccaacatgggcatccccatggcctcaacacagcgcctggcacctgtgcattcaatcaatgtctgcaaaatgaccacgatcgggccatagtggatgctctcaatgccctgatccacgttcctgagctcactctgaacccatctgtggcttcaccggacagttcctagccactgacagcttttctcacatgaagaaccatgggagcttcctcagctccttgcaaggaagcctggtcatgctggagattaatgcacccagggcaacattcgggcaatgggagacagcatcagcgtgtacacaccccgagactggcatttgctctgctttctcagagggcgtttgcaggacggagctccagttgtccatggtggtgacctgcccataaatgcactcaggatcaatgtccccccttccctatctcatgtccccactctctcatttctgtttcctgggattatctcttaaatgaacaatctgcacccatgtccttgtcttaccaagtgcctgctttttgtgggaacccaaactaagataggagctaaagaaatatatgaataaatgttggatgaatgaatgaatgagtgaaattatgaagagagaagaagagtctgaaagcaaaccatgcacattccaccatctccattgggctgaggccggttccaggaacagggactgacagagaaggaggctgtggctccttcccaaggtggagtccgagtcagggagggccaagtctcaatgggattgttcctggcagggccacaggagtcagggggaagcatggaaggcctctctgtccagatgcggcagtcagggctggctgcctcctcccagaacatcctccttgtggccggtatccatgcacgatcctacctggagcctaagggaacttcagcaatgaatgaaggaggcatcacccagagggcagcagtaccctctgggatggagtaagaccatggcaggctgtgttctgagccgagttctataaaaataacataaaggcccagataaccggggtgggagtggggaacatggaggagctagagctgaaagaggaaaggactgggcaccccttccagatggctccttccccgctccccacccatcctgctatgaggacagggatgaatcgaatacctgaaggcggaaacagaaggcttcaccaaagattggatggagaaagccaggcgctgctgagcgcttaacgacaaccagccttctccccagaaccggctgtgagcacagctaagaatagacctgggccaggacggtggagtctctctgtgcgagagttctctgcgggaatattctaaactccgcagtggagccggctctgcctcagccttgccgagcagggggccaagcgtgtctgagtcagttcagctgctgtaacaaagcaccgtgatcggggtagcttataaacaacagacattcatttcccacagctctggaggctagggaaaccaagggctctcttttctgattcctagagtgccatctttgtgctgtgtcttcaaatgtcagaaggagaagagatctctcaggggtccctttttataagggcactaatcccattcatgagggctctgtccttatgacctcaccatctcctaagagcccctcgtccaaataccaccctactggagattaggtttcaacatatgaatttggggtgcaaggcacaagccctcagtccatactaatgtacacgtctctacctcctcagctgtgtgcagagcaaccacctttgaaagcaaatggttcaacatctgtagcaggaaaaaaataaacaaacaaaaaaacccatcaactcctgcagtgggctcattcactttgcatccacggaatggcttaaatcactgagtatgcaccaagtgtctgtggcgtgctgtgtttgcttggtgctaaggggcacacagcggagaggacatatccctgatcttggggaacttggattgatactctttggaggaacaagagggatagatgggaaagtgaaaagaaggccaaggagagatcacgagggaatttagtttggcaagtggggagggaagctgccttggcagttcgtggggtggttggagaagtaaggaagagattgggagaagccgggcctcacaatgtgaggaggaggagagagtcgggggtgcccatagggccgaaagtagcagagatgcccaggacaccactgggcttgtgcaggtgaagccgtgggtgaacgaaccttcgagaataggctcagtggggcggaagaccaggccacgcagctgcacaagatcagcagggctgggttgagtggaagcaggaggaaaaggatggggaaggaacaggagaaataaacaggtgggctcctccaggaaactgggcatgacacggaagacgaggtgactgttgggcatctgtggaacatgaggtcacatggtggcgagtgtcccactggtcgcttggattgggtcgatctgcccggctagtggtgtcagttaccaagcacatatcacccacccgagtgttgcagctgtaaaaagaggccctgctctcacaggatgatgctgagcacatgtgggagctccagtctcttctcttgcaggaaacctataacccacccataacactgaggcatctaacttttgctaaagagttgctcctctaataaaatcctgtggtttgaataggacagaacctagggatttgactcttcagagcatgataaccaacactgcagggtgaggctcgctggtccgagtgagccagaccagtgagatgctgagacttttgagatgctgaagcctcctggtagaggggtgcagccataactttgacccagggagcactgtaggcaggcctgggggttgctcagtaatgtctctgtagctgaccacgttcactgattcaacagatgtttatggagcacttaaccatatgggaggcccagtgctggggctatggtgggagcatgtcattcatgggctctaccctaatgctcccaagcaacatcagatcaggcatggaaataaggactatgaccttgtctattcttgccttagtatttttaattaatttatttattttgagatggagtttcactcttgttgctcaggctagagtgcaatggtgagatctcagctcactgcaccctctgcctctcaggttcaagtgattctcctgcctcagcccccctagaagctgggattacaggtgcccaccaccatgcctggttaatttttgtatttttagtagagacggggttttaccatgttgtccaggctggtctcaaactcctgaccacaggtgatccacttgcctcggcctcccaaagtgctgggattataggcgtgagccactgcgtctggacctttgccttagtattttaagagtcttctctgtaatggatatttacccagagttccttcctgctcagtctcttggcggagatagagaaatagtgtttttcagcagccacatctcaaagatggtacttgtgctgtggatttccctggtttgagacctcaggcttcccactatcctctgatatagccccaaaggactaatggaaagaagcacctttttttctctctcttgtcactcagcaccttccagttggtgggatttagagactgtcatcccaaacagagtgaccacgttagggccagactgaccgacacccacaaatgtctcctgggctgaagtagctgaattctccttcctaaattctctgtttggccacttctgaccagtgctggcctcgtttccccttcgtcttttagaaatccaattttacaagctgttggtcttgagtgtggacggttgcattttattaatttgaaaaaaaatattatttctaatgactcctctagccagttcttcctcctcgcagagctactgcctgtgtagaagggggctttgtttgcactccttttattgtcagaagtgtgagcagtgggctgtgggcagtgtgaaaccgcagtgctgctgtgatgaagcatcacgcattttccttgggctgtcataagaggggaagtggtgtttgtgcctttgctgggtaattcatggggtagtatgtagtgcttttaatgatgcccaaacaactcccggtttcctgcacagaactgacctatcccacttgccactaccgtgaatgtcccattaccaagatggaaacacacccctttccttggaatgccttttcttcctttttataacaaggccattgttggctgtgggagatgtgtgtgtttgtggcaggtggttccaggcctgctctagagatggctcctcactgcccaagatgtgacaactgacccccttagcaggtgcccctccaactacttagccctcattgcccacctcccttggctgacctgatttataccattgcatgtggtcagttcagtatcctcaaagtcactgcccaagcagctctttcttgtctatgctgcttcttcctagcagtccctcaagattgggtttaggtccctcccttttcccagaagcccctagtgtctcctgtaggccccagtgggctctcctcctctaaactttcatgttctgtgtgatcctagcagcgtggctggctcagcacgtgatgacagatgggctcagctctcacctggcctcctgcactgaaagggccttggggaccaggctcttgaatcattttccttgtgcatcctaggagtgcccggtgaaggaggagtcgatgagttcctgctgtgggttgacccaattgattgagagatggataactggaccccgtggtctgtgtagttttgtgaattcggagtttctttggggtttccaaaatcagaaagggcaggagaaggatgaagcttttagcaagacagaggcagatcttcctagacgtcccctgccctgcagttgtctggtcccacatttaagatcccagaattgcggacctggagacatggggcactgaatcctgcccactggctattagtcggcgtggtttactaaatctccttgcccatgaatatggtcattgtttaactgatggctgctttctctaccaggagcgctcagcatctcaaaatggccttgcgtgagcctaacacaacaagaagtgatgcttatttttgtgtattggctttcaaggctgactggttcagaactgcattgtaattctaatggcccctactgaacacactgtcatcagagagattatgtcattgaaaacaggaataacaatggtacaatcggttaaattgtttacccttattggacaatggtcagtgacaagttcatgtgggttgatcaccttcttcttgctttcttacattggcttcccctctctatcaggtgggagtttgtgctgatagagtgtgtgtatctgcatggaagtgtgtgtatctccctgtgtgtgtctgcatggaagcatgatactgtggaaataactcggattcttttgtttgtctgacccagatttgaatcccaactctgtctcttagtaagtatgacctcagccaggttacctatgcccatctctgatgtgagggtgactgggcacctctgtagctgtattgtgaggggtggtgcattggtgaggtgtgcagggtggtggagcaggctggcacccagtgcccaggcaccccgtgttttccgtttttatggcagatggcaataatgcccgggtgtgcgggagcagtgataatggatgttctcggcctttcggttcactgcagtgttcccctaaagtagatcattattctgtatggaataaatagtgttatcgggctgatatgcttaaggctaatgagcccatgtctagcatctgagaagccagataacaagacatgtttttctccattggcttctattgatgtattaattaatgaaatccaagattcccctttgagctggaagagtgtttaaatcactcttgagctgtacacagcactgtctccctcttgctcccagatgctggagaggccagggaaaggcaacagggtcttctgcctctggcctggcccaagcggggcaggaggaggtatagacatgaagtctgcaccagacatcccaggcttgtctcagtcccagtgcaggccacatcacagctgcaggggctctgcaagcccctcctccatcatcagccctgggggaccagctccggcagcctggtggccccgggcccaggcttgctcttggtctaagcatctgctccagttcacattttacctcctttgggatttctgtcttccaaagggccccaggacacaacactgaaattcactgtgtttataccaactcaaaacctgcccacaaaggaggttgtgtcatttcagtcctgggcaaggcttttgtacccatgtggtaggttggtgggttttgagtgaccatctccttttgcaagtagcagcatggaaaaggtcacagtgttgatattagacacgcttgtgttctaggccccatgccagcactgagtagctgcttgagcttagtcaatttgtggaaattctccgagcctcagtttcctggtctgtgaaatggggattatgaacatatggagcccaaagcgctgttgtgaggactacatgaactagcatgagtaaaagaattccaggaataaggcctgcaagaatagattatcaaggaggcagggatgattcttattgtaacaatgatcatacatctattaaatatggaatggggggctaagattgctcaaaaggtctttctcacaaaagtgaaattgcattatttttcataccttccagtaactagcttttctaatactctggtgagaaaatatccttaaaaatctgcttcaatatttaaaattggtgtgattagcaccttgttttccatactaagggagaagggcatctgagaaaaagttgtcagaagtggcgtatacatctctccaccaccttgctggagccataacgtgtgccttggcacccggaactaaccacagacttcctgcactccttccataaccacatacctcacatcctatagatagccatctagcctgcaacccataagtaacttaagccccaacatcctaaaggtaaccatgtacctctgcaccccatcagtaaccatgcacttcacatcttacaggtgaccatctaccccacactccgttagtaacctgagccccaacatcctaaaggtaaccatgtatccctgtaccccatgggtaaccatgcacctcacatcctatggataaccatgtactctgcaccccataagtaacctgagcctcacatcctaaaggtaaccacgcacccttgcatcccatagataaccatgcacctcacatcctatagctaatcatctaccctgcaccctataggtgacctgaacccccgcatcctaaagataatcatgcacctcacatcctatggatagccatctaccctgcaccctataagtaaccttagcccccacatcctaaaggtaaccatgtacccctgcaccccatagataacaggtacccttgcaccctaaaagtaacctatactctcagactataggtaaccatgtattccagaatcctttaggaaaccatatacttcacatcctataggcaaccatgtacccctgcaccccataagtaacttgtacccctgcatcttcaaggtaatcatgtaccctgcaccctgcaccccacgtacccacacacacaaggccaagcctgcagagtggagtaaagttgcctcttcagtctgtgttgtctcacatgcaacattcccacgtgctgttgccccctccagcctgaaggaggaaggcagcctcagaaggcttcttattcgggcccacctttgctcctccctgggagcatggcaggtgtcctgctctggtctggatcatacagccatgaccatcacacctcaccctgggacgcatgtgctgcacgtctttgccttccatggtgaacctctgagtctctctccctgatactgctattggcagtaggcagcctgcacaccctgccaggacaccatggtgattagcatcggtcagtattcaccaccgtggaccccaaaacttctttctcttctgcatttcgtatcggtacacttaatgttttacaactcacattctactctatttagaatcaatagccactcagaattaaaattcgagccgaactataaaccataaaagcccttgattatttcattagtaatttactaattggcattagatatttaattacacattccaaatatttgatgaattattttagctctgcatagaaagccagtgatagggactatatttttcaggaaacaaaaaacccagagagatgccgcgcgggaagggttagtgtctatgcgtgtctgaagccggaacaactggtggaaggatttgccttttctttgaaggaggccacccagacagccattgagtccagcttggtatccagtgacccaagcctgtttctctcccgtctttgttcaacaacacggctttctgttcccccttttcttttggagacgttatcttttctgctttgatctgcttcccacaacataaggtgatttctcttcttatcctcctgatgggctgtgttttgacatggataaaaaggagtcagcctctcacctcccgtcactcgctctcacccagtcccttgtcctcccaattcatctcgcagcaggccctgtctgcatcggacaccagatggcccccacagccttcttagaatagatttgcattagataccactcggtctctggctccctttcttaaggtgtgggagctgtttctctagaaggaaaaaaaaaaaaagataatttcagtacaagaaaaaaaaaacgcacaaatgttcatttctgtttcttcagggatctttctgatgataagtgggcactgaattcacgcagccccagaagtgccttctacctctctcttcactgtgcccaggaccccatctactgggcacccacctatggaccaacatctccgtgggacaattcaacaaatatgcgggaagatgtacattgaaagatgggtgtttgttcttaatctgcctggctctccatagacatcagcttgtctatctgttgtgggggtggcctgagagctgaactggacccaaaaaagcaaaacagcacagctactcacgcactatgctcaccctgggccagacccgggggagagcaaaatatatttctcactgattctcacactgaatcctctgttattctcataacagattgtggcaggccatatgtggaacttccgttgaccattccagggaagcccagggagggtgaatggatgatacagaagagaaggctgcatcccggtcacaaacctgcaatacaaatcagaaggaagaagttagcccttaaagggccagccgagccccagtgctgtgccatgaaaggcatattgtcaggaattacaacatggacccaacggcccttatttggaagatgcaaatgcaagtctcctgccagacagacttgctcctaagtaagagtagccatttgggatgcctgtgcaggagggtgcaatggaagcttgaagaccaaggaatccttttgtgtctgtccacgaacactctaggaaggaagtgggaggcatgaagagaatttgctaccagcacaccctctccagcttagctcagcttttaattggatctttttatttttttcttttgagatggagtcttcctctgtcgcccaggctggagtgcagtggcacaatctctgctcactgcaacctctgcctcctgggttcaagcgattttcctgcctcagcctcccgagtagctgggactacaggtgcccaacaccatgcctggctaatttttgtatttttagtagagatgaggtttcactatgttgtccaggctagtctcaaattcctgaccccaagtgacttgccggccttggcttcccaaagtgctggaattataggcatgagccactgcgcccggccataattggatcttgagccatcacttaacttagctgtaaaatggagacagtgtgccccacccatctcatgatagagggaggatcactgaagacaaggtcttgggaaagtcccagcaccaaacctcaggaagggctggcaggtggaggaggagaatgattgtgtttcaccgagccattagctttactcctccttctctggcttctgagctttagaatttatctgtattttaaccagcctgtataaatagatataccaggttttatgagaggctgcctcaaatccctttggaaatagggtgggtataaaataaaaaccaatacagtaatttctcaagagaaatctagctgcgatgatcaacatcaaggagtgcctttgtttctctctggacttggagccactttgaaataatgaggcttccagaagcaggaagtttgtcctgtccttgaacccccagggtgcatgttctggggaaaggagaaggttcaagtctccacgcaaaggatttcaggcatgttccccatggtgctgaggtggacctctaagccctggcctcctctgtcccagcctctatcacactgcagccccagagcaccccctccactcaccaccagggcgtcctccccttgacctgctcacccctctttctggtcagcttaatcatttccaccactcccaagacctctggaccaatcagctcttcaccaggtcaagatcaatgtttaacaactgaataaaagagggaatcccatcgtttaattggaaacaaagaatggattgtagaaagatctttatcatctgggtaaatttcgaagtcaaggtgtgacagttctgattaactgattaagctgattcacttcgcctggcttgcttgtctccccaccctctgcttgcaatcctacaagacctttagggcccactgcagggctggtacaggaagcctttacaggtcccttgcagaatgccccctaaggttatctgtctcttatccctggggcactcagcacctctcttgggtttagctgtgtctggtctccttccttccagggagctgaccatcctgttgctgctgttacctgctctgggtgcctctgtgtttatttcacagtgtaagacctggcatagattaggtgctcaatgactattttgtttgtgaattggtggatagatgacataaactgcagacgcgttcttggacagctggaaagggaggagacccttgggatttggaatgccactgactgccctgtacagagagcactgtgaggctggtgtcatacaagtgtccaacatcaaggattttgcccctagactcagaaagggtgtggaaaaaagcagcaggaagagaggcagggatgaatgaacttctcctgggcaggacaaggagaggagtcctcattgactgagggtcagagaagctgcggccctcagggctggctttcaatttggacacaggatcagagtgatgggggctggcatggccagggatgggagggatgtcaggggctgccaccccaggccaaacgccacccaaagagactctttacatagagagacttgtgtatttacctttagggtctttgagcttgtgaaatgcttttctacttggaagacacaaggtagaaaagcagccgcttagaattggagcaaaagagatcttgggagcacaggtgggggacgggagagaacagaggaggaggtgagtcttcagaggggacatttccatgggccctgattgtacgtgcccagcagacttcaaccaaaatgcctggttccagccaggtgtggtggctcatgcctgtaatcccagcactttgggaggctgaggtgggcagatcacttaaggtgagaagttcaagaccagcctggtcaacatggtgaaacctagtctctactaaaaatacaaaaattagctgggcatggtggtaggcgcctataatcccagctacttgggagattgaggcacaagaatcacttgaacctgggaggccgaggcttcagacactcaatgagctgagattgtgccactgtactccagcctggggaacagagcaagactctacctcaaaaaaaaaaaaaaaaaaaaaaaagagagagagagagagaaacctcgaaatgcctgaatgcctggttccagatcgcctcagtgggtagagacccaaataaataggaaccacccagttttttcctagggcataggcgcaattgctgtgtttggattttttttattttattttagacctagggtcttaccactcagtctggagtgcaatggcgtgatctcaactcactgcagcctcaacttcccaggctcaggtgatcctcttgcctcgccctcccaggtagctgggactacaggtgcacaccaacacactggtgtccttcttttgttaggatgggatctcactatgttgcgcaggctggttttgagctcctgggctcaggcgaccccgacctcggcctcccaaagtgctggggttacaggtatgagccactgtccctggtgatttagggaatcttaagagacaggagtgtatcatatttcctgggtcttgctacctagtgtttgagccaaacatgcatagacccaacccactgcccacacatgtatatacccatgcacatatgacccgaggttgtgtaggagatgagaggctgtgatgtagcctggcccttacacaaccctccctgtgtgcctccctcccacacataggtcctcctgaaccctgggagagttggccgctgtgccaggggtccctgcccccatggagctgagagcctagtgggagagacacacacccaatcaaataatcagatgcacaccagtcaccaggaaaggtgacattttctaggaaggaaagcaaaggcatttggctgagggggacagataatgggatatcacttgactcagttttggagaggtcagagcatgccttacttgccttattttgataaaacaggaaaaaaatatttaaaagcaaaagggactgaggccatttgtgccttctaaggatgcctatttgtaggggatggggaggagcaattcacctccatcaggaaatagctgtcctttgtccttgggggctgaaatttggagaactggcctggtgagggctcaggctgctgaatttaagaataggttcttgcacctgcacatggagtctggggtctgaacaacaggggataacttgctttgcataataaagtgctagaagttagatgtgcatctatttatttgagttgctggggtatcagatggagatagagagaggagagaggtgtccagtaataaggggaagggtgaagtccaaatttgtggaaaggatgagagaattttaaagaagagagctctctatcactcagttttattttactttactttattttatttaattaatttattttttgagtcagggtctagctgtgtcacccaggctggagtgcagtggtacactctcagctcactgaaacctccacctcccaggttcaagtgattctcctgcctcagactcccgagtagctgggattacaggcatgtgccaccatgcccagctaatttttaaattttttttaagtaaaggtgaggtttctccatgtcagccaggccggtctcgaactcctgacctcaggtgatccacccacctcggcctcccaaagtgctgggattacaggtgtgagtcatcgcgcccagccagaggtatcactcagttttaaattgtctgctgtgtggaagtgcccctgctgctgccccctcctcacccacaagcctgttactcttgagtcattagcaaggtcctctaccaagctgcccccagtaagtgcaactttagatgagaggtgaaaggaagttgaagagaaacagggttaggctgacggcagcggtggggttgaattaaagacagcagatgctcctgaatttgcccagagctggaagtcagagccctaggccctgggactcttgggaaggagtttggattcaccccaggtcacgaggtgaggattggagctgctattgacttgacatctggattacattaaggccgagaactgggatggagaacctctttatctgattatttggtactaacattagtcagattttaagggggaaaaaaatcagaattataggattgttacaaacaaagcctttcattaaatctgagtatgctggataactgacgctaatggctacagagtgtggacaagtgggtgtcctgctgaacctgcactcctgaaggaccgagggccttttgggacgaggggggacctgccgacacccagggtaggtctgagacacttgaaaactgctgatcttaaaaggttctagaaatggtgtcccacagtgtctgttcacagagcccacactcagcacatcttttgcgcacaggcggagcaaggtacagtctgcctggtccttgtctgaatttctacttattcacactatttaggagcaaatgaataaagcctcctgtatcaggaatttcatagccccaaatcaacttggggaatccatcatgggcaaaggttgcagctgcacctcaacgtagtacctttgcaagaggaacccttgctccttcagccccctttggagtgcatagacagaatctgcctttgaaagggcgtgccctggagcactggagggatgatttagggtgagtgtttctataggtttctcaacagcggcactgttgacgctaggggcctgatgacattttgtcctggaggttgccctgcgagcattgtaggaagttcagctgcccctcggctgacacccatagatgctagtggcactcccacccctccaaggtgcgacaaccaaaaatgtctctggacactgcccgctattcccgggacacagatttgcccctagttgagaatcattgatctatcggaggcaatttgcaggcacctgccctcaaagagcataaaatctgtgattaaaggcaaaacccgtgctgagggcagaggccactgcatcaaaggaagccggggagggaaaagcccaccttcatggtcgctaataactctcctcgtaatttcaattccggcgagtcctttctgctttcttcttttctaagaactatatttctgaggtcccaagtgacacattggactcattaaggcttcttaattcccacatgaattattgctggaagggtctgaaggcccagtatctcgccttattacacctgtagttatgagcagtaactatggcctttattacaacattcagcaccagctattaaatgtgaggcatgaaaatgattatttcacccccaaatccacttaccactggcacatttccacgcatgttctcataccaaaccgaggagcattctgccgacgaccctgccaaatgccgagacctctctgtggggatgcccgatttgctgaggttgcctgtcaatcattcttcattactgtttatagagtccaatttcaagatttccttaggtgttggcattagctaatatttcaataaataaagcaaaagctagtgctgtcactctttcccatttcaccaaaggatttttctttccctacagaaaatcagtagggctaaaacattccttgtttagcttggggctaaacacaccctacatgaagcagaaaaaatcatctaattttttcaatgaaagcctatgccagtcaaagacattcttacctactcacacttaagaggcatcaaaaatgtacaaatattagaatcctcggcctccacaggcaagttgccatgtacacaattatgaaagggaaccaaattaagagggaatgtgcagaacgcctttgaaatatcgaagaaaccgtgaacgctgcttcattttaatgtcttagatttcaccgataatgaggaaattgtcctcgttttcatgggtagaggttcttaaaggttttaaaatctgaatagtaatgctgctcaattgtgcagattataaataacttttgacaaatccagtgccttccattttgagtccactgttgaaaatacagagagcaagtgggaaacagagagagagtccaggggttgcataggataccattcaaagaagggaagaaagagaggcatcctggtaacaaactctttctctcccaagaaagagttaacagaaagaaataaaatcagatatgtgtagcctccagacgtccattaaagtgcagaatgctgttttctatcacagattatatgccagatgttcaaactatctctaatcattgcagatgtaatggagtagaatgttgcagtttgtgagtttactggcattaatcctatatactgcacaagggaaaagattttaaatatataattatatctcattaatactcaggttttatttcctttcaatggaacaggacttattaaagcaaccatttaccgcatgttttctttcagtatttggctccagcataatcctgtgtgcatttgacgtgtaaatatgtactaacctgggtgcagaaaaacacccaggaatggctgtgagtccaccgctaccaaaatttgcttttataagcatgagatgtttttatattgtaaattgataagagagacttaaccgcatactttctgagtcgctactcgggttttcttcatgttggaaatatttgtgtttcttcatttgaaaggaaattgccttcacttcggctctttattgcacgtggggaaaaggtgcattctggctccagagggggcctgtgcaggtacgggtgagggccggaacccctgagtggcacctacattctcttgggcacttgtgggacccactaaaggactaagaaagttgtgtggttgttgttgttgtgtttttactgagcatcaccatggttagggtgtatctcaaggggaatgcaggagtgaggagtaaagaaattccttcttgagcctccctggccactcttccctaaataaaatagcaaccttttcaccaaccatctaaactgggttggagtaatgaatactaacaccaagccatctcccgggctgatggccagcttcctccgtggctggagcacattcacagaagcctctctggatcctttctgtggagccggagctgtccctgcatccttccccgtgagcggggaatccatgctgtcccaggggttgagttcctttgctggctgaggctggccctgtggacggatggatacacccaccgctagatgggagacacgggagcttgcttcctgataaggacagaggctgaattttcggcaatctgctctttctcgcgactctgggttcaatggctgtgacttatttggtgattctggtaacagactcctcaagcgcaggggctgcatccaccttgctccctgatttcccccacaccagtacagtgcctgacacctcatcagctctctccttacctctttcttaagtgacagaataaaagaataaattactgggtagtgaaggtcttttgggaaaagctgggtggggcttacaatttagtacaatgtccttagctatcatttttggcgtggaagagagtttgatggattctgcaataatgagattgacgagacagatggtcgctgccaggaattcagcagaggccagggtgatggagaagcaacggctctgtgtcagaagcaggggcgggagcgggaggtgttggaagctcagtggtggtttcatacccctggggaagaagcgatctgcaggccgggtggtgaatgggatgcatgcaagcctgaaacgggagtgctgagctcacaaagcagagtcatctgggatatttgggtggaagctctggggcgccagggaaagtcccaaaggagggttctgggaagagggtgctgcagacagcaataagaggaggagattggaaggaggggcaaagcagttcatggggatccctggaactgagtccagctcatccaaagcttctatcttctgcttttattttataatatttaagttataagtggatgctgccaattaggtatacagatatacagcctctctctctctcttcctcctctccttccttcttcctcctctccttccctcttcctcctctccttcccctttccttttaggacactaagatcaacaggaataaaattcctgagtatttatctcctgaggggcagagctagaaagaggagatctatgcagagtttccaatttagaattatattaaatggggtgggggaagctgagtgttaatgtccttttcctttttgggatttgagtcctctgggagccaggactcagagagcagtaggcgtggggcctgggctgcagaggcagctaggggctggagcaagtgccccagggaaggagggccaggctgagcatgggtgagagacctgagagcccaggacaggccacttccaatggggaagaccccggtgctcccggctgcccccagggccagtggccagtctccgaggggcctaagagctggaggaaaagggctgtcaagtccggagggcaggagctgggctggggtgaggggaggtggcagatgaggggtccatttaggaacaaggccctgctgatatggaggaaacagaaagaaggtgagagtcagcacggtcgcttcaaaatggtgacaactgaaatcttctactcaacaggaatggaaaaccaggtaggaatagaaacctggaagagccagatgaccagaaaagagcacttatgcattttggaaaaggacgataacctcgtaccactaaaaagttaactgaaaaaatgttttaatttcaatggtttttggggtacaggtggttttcagttacatgaacaagttctgtagtggtgatttctgagattttggtgcacccgtcgtcacccaagcagtgtacactgtacccaacatgtattcttttatccctcaccacccccaaccatcccttccgagcccccaaagtccattatatcattcaaaaagttagctttctagggaaccttctctgttcgcacatctgtctccaatacaggactgtttgctctgaatgggagatctgtcttttagtgaatgtttgccgaatgcaagaagaaagcacaaagtgaatgaaataatagataattgatcaaaatggatatgtggcaagggtcatcacagaggactacacaagtgaaactcaactatccttaagagttttaaaagatgtgacatgttaggttgcctgtggggaacccatgaatcggcaataaggaataggaagctcagtccaaatagttgttgaggatcattggtgggtgatggggcacatggctgcaatcaccttcacgcaggtggtcctgaggaagttaccttgccctgaggcaagcagggattatcccgaggggagactatcacctgcagctagatgctgggttccaattcctcggaggggcaaagagatccgacaaaagctcagtgctcagggcccggtgcaggtcaggcaactcttgctgctgactgagcaatgcagtcccccttcacaattaggggtgggcatggtttgttgttctgggcacagtgaaaattacctattagcagcacagaatcttctggaaggcctcatggaagcatatccggattgaactttctgtccagatcagcctaaggacactgtctcccgtgtcatggggaccactcactgtacgctgcactgaactcactgttttttggcttcctagagtttggggtctgatgctcacagcttggctgtcaggcctccactgcatgtaagtgttcacagatgcacctctttggccaagctctggaattccctcctgctctgcactggaaacggacagtgtgtctgcctctgtctctctcttcctagactctcagcccctccaggctggggttctgcagcctaggagcatgggctctggagcctgcctgcctatgtttgcaaacagagcccatgctttcctcactccaggaccatggacacaccttggtttcctcatctgttaagcaggatggagttgttttcaggaggaaatgaacgtgcaaccatagagtgctcagaaaggtgtctggctctgtaagtgttgcaggtatggttccccaggaaacaggccctgagaagggggctcacatgcaggaggtgtattaggaggttccctgggaatcaacacctccatgaaggaaggggaaggaaagaggactggacagagggagatgtcaagctgctgcatcagcctaacaatatccacggcctgtccctgcagggaggtctagagtgagattagctctgcagaattgcccagagctgggctgagatggcaggctttcatgcttctttgtcagtcaggcactggatgtggtgtgatgttggttgaggcagctctctgcagtaaagaccatcctgggaggaactgacagctgaggccatccgctgaactcccagaagcagacgtaacaagtccttccttggaagggacctggatagtgagtcatgctgtccaccaccatcttctctttggctgttcagatccacttcttcatatgcatggaggtagcgccatccccgggattcccatgggtctctcttcctgagggaaactctagaagaggaagattcatggagtgaactccagcccccactgctgccgctggtcttagggtcctgactgatcctcaccatctgctttctccatgattaattctctattttcattagcaccggtgccagtctcaatggcttacttgaagtcatcacccatacctttgcccataaagggtttgagggtttgagtttctggtgactatacttttctcaggtcaaggttggtgcatttgtccatttgataccacaatggagcaaagaaatgccacccaggtaagtgccctgttagaggagtgaaacagctttgttgtcaggggtaatacccgaggttccttgccttgtaccagacacatgtggagtgaggctaagagcagcggtttaataggtgaaagaaagagaaaagagaatagctgcctctcctgcagagagagagaggggagcccaagtaggtcttccgcttttgtggtgaagtgcacggggttttatagactggcttgaggaggtggtttccgatttacatagggcccaaagattggctggaccaggtgtgacatttacatagcacatgaagaagctagataccccaccctaaccttctcttgtgcaaattgattctttacctggccagtgccatgatgtctgcccttgctgtacatgtggttgacaaagcaaagggaacatggggccgccatgtcgaacatgcctaacccccaggtagccttttcctattgtcacagctgccggcattcactcctgcaagcttccagcttgcttatctatgtttgcagctcaattttacagactgctttttgttaaaaaagaaatgatgtgaggcctgttttttattaaaagggaaacctgaccaaggacttccttaccgtcactatctgcctaaataatttctttttaactcctatatcgggggactgaagggagactggtaatcattagagtcccaagtagcaggagaaggaggcatggcaggggattttctgcggctttcacagggagaaatgtgcaagtggcataagcaggatcaacaagcttaggattggcaactttgaataattttggcagactccaaggaacagggactgtcctgagttgtctggttccttgtcctggggaaattaggggagggaaatattggccgtggagcataagagacctgtgagagcccagtaaaagagatggttggggagtatgagctttggattggttggttcatagccctaggagagacaatcacttcctggtcaggtctcaagatgtcaaagcatcacaaaatacagaaacttaaatatagaattcatttccttgcaggcccctgaccatctggtctgggccattgcccatgagttcatacatactctaacctcaggctacttctttgttcatacaaagtgcatgaccaggcacaacacctaaagcatacccattgagaagttttctttcccctctgcctttccaagtcattcctgggtactgggtagtaatgcagctgctatctattgttatctttaatccacacactgagctcacccatctgtgaaccaaatctgatctttttcctcttgtctgaagaccataaggtatcctgaaagtcatagggtgtgctcagggagagtagtgggtatcagagtgtgaatgtgaatgatatggagctcaaagctgcctgctcatgcaacctgcctgtgccccctggctctgctgtgcttggtcccagattagccactttaatcctccatggattattgctgggttacctgatattgttatgtgtgacagaacacaactcatgatgggtcctctctcttggggccccatggtcaggcactccttctttatcaggtcttggtggctacactgggaggtatttttccaaaggcacattctctgctgtggaaggtatggccttgatccaaaaccctaggggtctacattgtgagtcttcctttgggatttgttttaaaactccacatgacatcatttccttcactgacaatttttatgctttggggtctgccagatcataggtccatctgcatcacaggctggacctgctacagagctcttttctcttctgggcctcatacaaaaccagcagcttttcatattacctggcgtataggtgacaacagtatttccacatgtggaaaatgctgcctctagaatccagagtctagaaccagatgtcatgctccatcctttatgatgggagctcataatttatcttttactatggaagggatgtactgtcatgcctttgaccactgaactcctaagaatgttagtgatgtagccgactcctttgaatctttgaaggagttcttttctcaccctctgcaatgcatgtgtcttgtcaaagcctctgtcttagtgagttcaggctgctataacaaaagtaccacagacggggtgactaaagcaacagaaatttattactcatagttatggaggcttggaagtccaagatccaggtgctgactaatatggtttttagtgaggtcccttttcctggtttgcaggtggatgcctttttgctatttcttcccatggtggagagagagtgagcagtctctaatctctttatttctttataaggacaccaatccccctcatggggactctactttcatgacctcatctaaacctaatagccttccaaaagtctttcaagatgtcctcatggctcaggtcactttaaccatattatgacagagggagggaacgctaacatagttcttgggaaatcctgtgaatgtacacctttgctcatcccagaactgtttctgatcctttcttattgtgatagaaacaaaaatgcactcactagatcaaaggctgcccaccatgttcttgagagcatgtgaatcagctctaaggaagatattataactgatatggaagtctcaattggggtaactgcttggttaggtatgaaaagtccactgccattttccaggatccatctggtttttgcaggtctagaccagtgagctaaatggagatgtgatgggagccaccacacatgcatcctttagatctttaaaaagagcactaatttctgccatctccctgggacacaacattattattttctaccttgatttggggaatgggcccagtcaaggactcaatttttcagtatatctatgctaacatccattagaggactggaaacattaccaccaaagtgtctatgagtccagtggagcctccatgaagcagcctggccaggactccaatgattatatatctcccttctaactccctttgacaggggactgtgataattctttgggtctctaggtattggtgtctattcaaactctgtgtccaccagtcttcacgatgtttggatgtttcccttgccctagtccacagtgcaatgccctctgggaaaggactcagaattatgactgggtccatgtgccatggtattacaagaacttcccttgggggctataacttcagctgcattcaacaggctccaggtctgaaaagtgcacgagcagtcctggctttttcttgcagcagctgctctcagtcttctaaccagcagtctttgatttcttttgacggtacaaattgagcagtactcttgttgactactcttctattttgccccacactgtgttctattaaccatctccatgtctctttgcagatcagatcccctggctgcttctctaaccttgctacttatgacagtaattgcatcctcttggcttctgaaaatcaaaggccgcattgtattcttcctctgctctttcagtgttccatcatctccattgccattggtgagtccagttctgtaacagcctccttttccaccagctttggtccacagaagagagttgccattgaacttggtagtgatgtcagtgcttctctcgccagtgtattcccattggccttagtgaatggtatgctctccaagagttgccatggactgtgatgtgttttcagccgtatggagcatatccacaccagcatacctacttttgccatctttcaaattttttcttaacatttgctatggcaattctgacatttcaaccccatttgcttcttccacactcctagaagccatcttactatcacatctctccattttctgggattcttgccaaggtgttaaatcctgaattctcaaagagtgcactcaaactctttctaattcagtctgttgttttgttacagcctggcaggttcttctttcctgctgcccagaaaaagccaatatgttgagaacagcaggtgctgcagcagagaaagagtttaataattgcagggcagccatgcaaggaagacaggagatatttctcaaatccacctccctgagaattcagaagttgggattttaaagggttctttggtggacagggctttagggaattgaaacaattgatctgctggagatgaaatcacaggggtgtcgaagctacaactgagtcagctcctggctgggttttgcaggaccagttgcatcagttttttggtgtgggtcatgggtccaagtgacatctcttggtctaccaaaatgctaaatctaaaaaatatctcaaagaccagttctttaggtctcacaatggtgatgttatctataggaacagttggggaagtcacaaattttgtgacctccagttatgtgagcctgctgcagtaggcaactaaagaaaagcaagttaagtcaggaatggatggttattggttaactgtgtctattctttagcacagttcagacccctaccagaaatcttaaccttgttgtcttttattagcctttacaaatacagtttcagtctttgaacaaggaggaagtcagttcaagaaaaaaacaagtactgacaaaagcaagttagcttgtagtggtagaagcagaatagaatcagttatgttagatttcccttactactataattcctgcaaagatggcttcagtttcagtccccttggtcaagcactttcagtatctaattctgtatctaatgtcctggctgcaggtggtacctgctggacaggtcttgcagtacctctatggcatgagcactccatcctttttcattcccagcatgaccccagctgtgttttgttgtgatttcatcttagtgtgggagcaggcaagtggaggaaaatgttgagtggcatgtatctcatgatctgggaaaagcctctgcattgccttcaagcaagggaaggagttacctcttaagagggaagggtgacccatttctgcaagtccagaaggctctggggagcctggggatttaagatttcccaaggcattaattcagatgtctgcagcccagtgtcagggtccatttgtttctcaactagggccttgatgttggcatggcagacctgcctggattggggattgagagtctaacctttggagctcagctgctctgatgacaccattctaggcctgatcctcagctctctgtaccctcctactgtaagagatgaggacctttgatttccaaagatgcccactgacttttaattggtgattatttgctcttatctttttattatcttttcccagataacaatccagcttagctggattccatgtttcatttagttacatttcctccatatttctaactacctgataaatctcaccagcaaacacacccccttgaatgaacacaccatccttatcagcatctgtgagagttttaacaaatggactaacacctatcatatgatgggagccttattgtcagtggagtagtgattgaatcatccagcttcaaaatctcgcctcagggcttgctttttcttggactgcatctgtttctagttgccacagtttgggttttctagaaagaagacactgatacaaagtttagcatgcatcttgtttcattggagctgctataagaaaattccatggactgggcagcttataaacaacgaaaatttagttctcatagttctggaggctggaagtccaagatcaaggtgctggcagatttgttgtctggtgagagttcacctccttgttcatagacagctgtcttcttgctgtagaagggttccacttgcatgaccacatctagtcttaatcacctcccccaaattccatctcctaatatcatcacattgggtggtagggtttcaacatatgaattttaggggcacacagttatttagtccataacagcgcatttcatgtttatgaaggtatgcacttggcctcaatacctgtgattaagccacgggattcatcaagatgcaatgcaggctcagtgacagcctacggggagctctagagctggaagaccccttaagagccgagccaaggtggccaggcctttttacccctggggtcatcagtcgttgaatgggagatgcccaggaagaagcatgaccttgggtgaggtggcattccatagataacacgattcctaagagagctgacagttcatggccagctgatgcactcttagcatctggggccacagatactacattaaagggaaatctgagaaacacatcacagtgtcccccacaatacaggttatgattgctttgtattctctctcataataccccttcataaacatgaagcatgctgctatggactaaacaattgtgtctccctaaaatccatatgttgaaaccctattgcctaatgtgatggtattaggaggtggattttggggaggtgattaggattatgtgtatcagtttttctctcccagcccctaagacagcagacaacacataaataataaatattgttgaataaatagaactgcacaaaatatttctggaacatcctttacagaaactggttctctgcagagtatctgttggagccactgatatgtgggagtgactgatgaacagagaatttgagggccaacaggtcaggcaattctgatcctgttgcctggcttgttccttctcagcaaggtggtcatggcaggctcacatggggatgcaagctgacaactggtgtgggtgagtggccaaggttggagcgttggagtggaggtgatgtggaacaagatgtctggatgtattggagcaggcattgcattgcatgcacacttggcccacacaataaatgggaaacatccctgtttctagcaaacaaaagttgaccgttctgcagtagaagcaagtcaagaagcagatcccaccgagataggactccaacatttaaataacctgttaaatggctttcattgccaataatctgatttgcactcaggcaagacaagttggatgcctcaaatgtgtcaatatgcaacaagaagataaggaagagaattaggttcaccacccaggctttcactttccatccttcattttcttggcaagattgctaaatagttttatatggaaccagaaattgctgcctaatgctaattcgtgaatgatacaatcagtgctgaggtaaatggtatagagaattgatactggaataaattgggatgcatccctttaaataacaatatcaacaaattttggcacaaagggcaggggtctttgttgagcaacaatactatccccgagagctgaagcttggttggagagagacaggcatctggaagcggaggcgggcttgcaccctggctcctctacctgccagccctgtgaccttggcaaagtcctttacttctctcagcctttatttctgtaagatgagtaataaatgtcacagttgttatgaggataacatgagaaattgcatttagaacacttgacacagtacttggcacagaacaaccgagaaatactagctgttattatttattatgattgcttatctcccacctgaagtgctgaacactgacccccagggaaggtggagttgggggcagtcttagaggggtaagttacatctccaagtgtttccagctcattgcatggaaatccattatgcattgggccctctgagattctgaggatgggtaggaaacctgagcatcagggcactctccttcttgagggatggttgtggttacaatcccaggaaaccccatcaaaacctttttgcagttttgggaaaaccttgtgttcttattgaactttcgtaagcccacaggctgctccctgcctcccaaaggcacaacccaccacaggccaggaatttctctaagacagggagctttcctgatacaactttaggccctgggccttacactgcaaagcagtgctgagccattttccatgtagacgctctgaggatgggaagctctatatctgcctttgcaataggggaagcttctctctgccaaatcctgtcaagcacttcaggagtcatattctatttttgtggcatcatcacctgactactttattttctgattagtctgtgagttcctggagggtggaggcagtatcttgttcatgttttagtggccagcatggtgcctaggatggggcaaggactcaggaaagatctgctggatattctgtttctgggaagaaaattctggcatgatacgtagcattgatgggctaccatatcaggccacgagaggaaattagggttaataggtttcgcactgccccattacctcctctttccatatagtcatttgggtgcctcaagtcttccagatggctctgttgggttggttcctgttaaatattggtgctttttgaactctgagatgaccaaggtattttaagaaagaggttgtctcggggaagagctttttagaaggcattgtgacactctgtagagaacagtccagccctaaaataacacttaaaaatggctacgagcattacccctgtgtttagataaattctcctgaggagctttgttctccaacagactgagtttttggttgctattggttttaagatgcttatttcagtagcaaaagtcacccttggctacttgtgcagaacattgcatgtctttttatcattgttactgttattttaagcacatagtgatatatatatatatatatctccaaagttttgctttggatgagaaaagggtaagataccaacaaggactagaggtaattaaatgggtcttcaggaggatcatggccagagaccagggcttgcccagcctggccttcctcagccctccgcctctggtttcagtgtctccaccctggctgatcttgggtctttgtctgtgtgtggctttggattttcttactcttctcattcctgcttggaaactcctctttcttagtgccctcaggttacctcctccatggagattactgaatactgaattatgtgaatagctgaaaacatgctctattggcatatcaggtggccccagctcactgaaatgcaaggatggtcttgggggtcccagcatttagaaatggagggagtcttggtgttagaagtgattcttcatgggttgaaggagggggagtaattctgcaatactttgtggttcaaccttttgaccatctcgacgtcatgtttaacataagaaattgagtagcaccagttactagtggccactggaatcagagaccttctgatccaggaaattgattttatccattcatctttagttgaactggatccaaatggtggctggtaatagtcattttaacatgttgaaatattatttctaaaatagtcattcaacacaacctgtctggaagttttctggagaacagatatttttggaatccttttgacagccgggccaacacaattgtggtagagaatgactaatgagtagtcactgtatctcttagccccactgtttgcgagcaagccttattgagtgtgtactggctactgggcatgattttgtagtggatcagccctgctgactcccgacgcgtgagaaggctgtggatgttgaaggctatcccaggtaaacagataccagttgctccttaaccagagccctctcaacggctacgccaaccaaagggaatgtagagtcaagcatgaacccaggcagaaattgttgtgcatgagcttgccaaaagtgcttgattaaaaaaaaaaaaaaaaacctctgtgaaagaaaaatagaatctcaggaccccgaactcacaatgccaaaaggaaagttaagtttgggaactgagtcacgcaaaaactgcttcctttttgttcccagatagctgtcactttatatgtttgctttatctcatgtaaaatgtagatttgctgagcaggagacaatgcatggttgactcctccccatccttttctttaagcaagtgaaatgtggattttctgagcactaatcagagcctcacagaatgtcatcattgtctgcctatcctccttttctttctgcccctcgtttctccaaatattaaagttcccaaaactctttttggaaaaagcacaggacacaaaacctattggggcttgtgttccccagccccaccctgggcgtgtcctcaaccttggcaaaataaacctctaatccactgagatctgcctcagtcactttttgacttacatctccttcactccactttctccctgggagtaaactggtgtttcccaaagtgtgtgtcctcctggctcttgattgacttatgggaagaattacattgcctttagtggcttccattggagttgcaagcctggaagagtgatgggtttctcctaacagggacaaaaccctggccagggagctctgaggttacgcctctggagctgcatgggtacagtgacctatcccctaggtgtatgcacattgcctccagtgacaccagacaataggcaggctacagccagcactgaatgtcacccaacgctaagtccactcttctgcttagggtacggaacatgtgcgcttcttttttttttgagacaatcttgctctgttgcccaggctggagtgcagtgatgcaatcttggctcactgcaacctctgcctcccaggttcaagtgactcttgtctcagcctcccgagtagatgagattacaggcatgcaccaccacatcaggctaatttttgtatttttagtagagatggggtttcatcatgttggccaggctggtttcgaactcctgacctcaggtgatctgccacccctcaccctcatctcggcctttcaaagtgctgggattataggcatgagccgccaccaccagccacatgtgcacttctttatcagctctgaaaactgtgagcaactgaacttcctacaccaagggggaagaggacggtggagacagcacatgctgactgatggctcaatactccccctgtaaaacggtgaggataacatccagtgacagatgcacacgtggcttccaatctcaagaaaactgacctcataaggaggggagaaggtcagcaaggtttcccaggccgagaccctgcgaggtctgataagaaagggagcaattttaaaaatcaatggaatatttactggagtcctgagcatagtcctgcatctattgtaaaggatgcttcccaggtatctataaataaaagatgcttgcccttctgtgtgggtctcctggaagctgtagaaaggtacgagacagagaaaaaaaaaaaaaaaagccctctccatatcagaacattctgtgatagacggcatctcctactgacattttcattagcaggaaatttatgttcctatttctgtctgttgtaatgaccattcatagccatagcatggtggcggctaatggacaggaatggaaaaaaaattctttaattaatgcagaagtgaagctttttctttctgcactttgagaagccaagtaattcacagcagttcttggcactgaagtggaggtaaaataattatacgcaatttctagtgattaaaagattgtaaaataattttagttacatcttaaaattatttattttgtaaatgagaaaaagtgaagaaatgtgaataatgagttctgagtgtcagggtagattctggagaaagttcctcctggatgcctgactgcagatggcacctggcctctgagcttctggcctgaggccagccttgacctctgtccagccctgtcctgcttggttgcatggttgtccagacttggttggaagggaaaccagcccatctctgggtcttttctttgaatgcatggtcttaagaagaggagctatctgaatcagcagttgccttacaagggagtttttgtttatttgttgtattaggattctctagagggacagaaataataggatatacatgaaagggagtttattaggagaattgactcacacaatcacaaggtgaagtcccacaataggttatctgcaagctgaggagtaaggaagccagtccgagtcccaaaacctcaaaagtagggaggccaacagtgcagccttcagtctgtggccaaaggccaaagagctcctggcaaaccactggtataagtccaagagtccaagagccgaagaactggcagtctgatgtttgagggcaggaagcataaagcacaggagaaagatgaaggctggaagacacagcaagtcagcttcttccaccttcttctgcctgctttttctacctgcgttggcagccgactggatggtgcccacccacattttggatgagtcttcctgagggtgggtcttcctctcccactccactgactcaaatgttaatctcttctggcaacacccagttagacccagaaacaatactttgcatgcttccatccaatcaagttgacacttaatattaaccatcacatttgttttgatttttgttttcttttttgaaaatctaaagccaggcttcagggaagccatgtagggtgcttaaggtaacacagcgaaagtgactgagttgactggtgcaggtctgtaggcccaatgctgcttatgcctcccaaggccttctgcacgcaggtgcactctgcagacactccatccccttcctctcttgagaggatgcgggagggcacatgagagaaagcaatatggaaaattagcagatgaactaggaagaaaaatcataggcagggtactctgggcctcctgggttgtggaaaggagctgtacagagggtggtgtgttgtttgtgcagtatggctcaatcggcccttacccggcagcatccctgtgggatactccatgaagaagagacaagctccaaggcgatggtgcagggatgcccaacacgtatttagcaactcagtcagggaaaacaaaggtctcctcacagagaaatgcccctcactacactgtttttctcgttaggtgtgggtgccttaagattgccttctttacatttccacacatttaaagaaatcctgctcaaatcctagagcagaaagttctgggactggaggactggaggctacatcagcagcccagcctagtggaaaaaatgaccacattttataaattgtaaaatgtgtttattgtagtatttctttatcatatcctgaataatactacatatgcttacatacatttatatattaaagtgtgtataaaataaaatttatacaaaaccaggtagataagtttacagatgatttcaagtttttttttttttcttttttagagacagggtctccctctgtggcccaggctggagtgcaatggcaccttaaaggctcattgcagccttgaacttctgggctcaagggatcctcccacctcagcctcctgagtagctgggactgcaggcatgcatcaccatgcccagctaatttttaaaatttttggtagagatagggtttcactgtgtcacccagattgttcttgaactcctgggaccaagcaatcctcctgccttgaagtctcaaagtgttgggattataggtataagctactgcacccagcctcaagtattctttaaaggtaattttgacactgtgattttccatgtgcctactgaagggcctatctctttaataagaataatttcaccagagtaatagctatggctttcacggagtgtgcccctgccaggcactttgctaactacctaggatgcattatattacagaatctccacaactgcccttcaaggtaggtattattcccatctcttgagatgtaggaattgatgattagggagttaaatactaagtatgcattttggagcaggagtgatctggtttggatgggaacttggtcatttcctggctgtagggtgcagatagcttactgaaggcctctcagctcagttcctggtaaccatgacagctgttacaagtgcatccctgaaggtctgtgacgcgtccagactcctcttctgcctgctgtcccatggcaggctcttcctttctccgctgacttgcttttgcaccttggccatatctgtgtgggtctatttctggaaactattctgtaccacccatcagtatcccctcgctaataacaccacagtgtcccgaataccgaagcaaattctgaaatcagacagtgttgacaaatttgcagcagcatttattgaaataatttttgattgtttttcagtatatagtctcaaaaatattttattacgtttgtcctaagtattttacttttggacctattgtaaatgatactgtttttaaaatccctgtttctagttattcattgttagtatatagaaatatgataaatacttttcttttaaatcttttatcctgcaaaccttgataatctcacttactagttttaaaaatatttttgtagataccttgggattttctaagtatacaattattaatatttcttctgtgaatagggacagttttatttcttcctttctaatttgtgtgccgtttcttttcttgccttatggcaccggctcaggcatctagtaagatgtaaaatagaacttctgggagtagacatccttgctttcttcccatcttggggaaaagcatctaatctctcatcattaggtgcgatgttacttgtaggtttttcacacatatcctttattcggttcttattaggttgaggaattctcttctatttctaattttgctgagaggttttataaccataaatggttgtctaatactgtaaaattctttctctgtaccagtttatttgtttttttcttctttagactaataacaaattaatatggttgatagtgtattatattaattgatttttaaacactgaatcagccctatacttccaggataaatcccacttagtcacagtctattattacttctatatattgctgaatataatctgctaacattatgttgaggactttttcctttcttgtacatttttgtctagctttggtatcagggcagatctaatctcctaatttgggaaatagtccttcttttattttcaggaagggattgtatagaattggtgttgtttctcctttggatgtttgtcagaactcagtgaaactatctgatcgaggaggacaattttttctccagatttttttttttttaaacttctagttcaatgtttttaatagttataagatgattcaggttacctatttcttcttcgaaaactttggctgtttgtgccatttggctaagtagttgaatttatatgcacatagctttttaaaaataatgttttcttattaaccttctaatatctgtgaggtctgtgggcatgtccctttttcaattctgctgtttataatacattttgtctttctctggtattttccttgtcagctaaaagtttatcttctactttttttttggagaatcaattcttttttgaagaatcaacttttgttttctttatttttttctatttattttttattcgtattttcttttatttctctttattatttcctgcttctgcttgttttgggtttcttttgctcttttttttctagtttcttaatgtggaagcccagactgttgagttgaggtctttcttcttgtctaatgtaaactttgaatcctataaattttcctttaagcactgatttaagtacatactggaatgtttgatacaatgtcttttcattttcgttcagttaaaatagtttctaaattttctttagattgcttttttgacacgtataattcttaatgtaacttttagagcagttttacatttacagaaaaattgaacagaaagtaggttcccacccctcatcccccatgagtttccccaactgttaacatcctgcactggtgtggtacatttgttataattggccaacgaacactgatacattattattaaagcccatggttcacactatggttcttcctttgtgttgtacagttctatggatttttccaagtgcataatgtcttttatccatcattgcaatatcatacaaaatagattcactgccctaaaaatctgctgttcttcaactgtttatcctttcaccatctcaccccacaacccctggcaaccacatatctccttactgtcgctacaattttactttatccaaagtgtcatatagttggaatcgtacattatgtactattttcagattgggttctttctctgagaaatatgcatgtaaggttcctctatattccttcatggcctgataactcatttctttgtattgctgaaaaatatccccttgtatgaatgtaccattgtttgtttaccccttcacttatggaaggtcatcttggttccttcctatttttgccaattctgaataaaactactatgaacattgtgtgcaggtttgtgtgtgggcataagttttcaagcctgttggctaaatacctagaagtgtgattgctggattatatgatacgactgtttagcttcacgagaaactgccaaattctcttccaaagtggctggtgtctttgaaatcccaccagcagtgaatgagggttctggttgctccatgtcctccttaacaactgctgtcttcagtgttttggatttcagccatcctaatagatgtggagagatattgcataattgttttcacttgcaattccctaaagatatttgctgttgagtatcttttcatatgctgttttgccatctatatgtcttctttggtgaggtgtctattcagatattttgtcacttttttaattgggttgttttctcattatagagttgtaagagttcttcatacattttagatgtaagtcctttatcactttgttgttttacaaatattttttctcagtccatggcttgtcttttcattctctgaatagtctttcatagataagttatcaattttaataaagtctaagttaccgatttttttttttcatggacatattgccaaatccaaggttacttagttgttttcttttttcccatgctgtcttccaggagttttatagttttgcatttaatgtttgggactcaggtcagtgtttagacagacttttttttttttttgtatgtggatgtccagttgttccagcacaatttgttgaaaaaactatcttttctccatgtgatcgtctttgcccctttgccaaataccagttgactgtatttgtgtgggtccatttctgggctttctattctattccattgatctatttattcttttgccaatatcacattgtcttgactactgtaacactacagtaagacttgaagttggataattgatgtcttttgactttgttcttctttaacactgtgttggctgttttgggtcttttgccttttcatataaactctaaaatcagctgtttgatatccacaaagtaactctctgaaattttggttggaatttcatttaacctattgatcaagtttggaagaaccaatattttaacaatgttgaattttttcatccatgagcatggaattgttttttatttatttacattttcttatttttaaatcagaattttgtagtttttctcatacacatctagtacatattttgttagatttatacctatgtatttctatttttagtgctaatgcaaattctgttgtgtttttaatttaaaattccaattgttcattgctggtctacaggaaaacatttctttgccttactgtactagctaggaattttggtatggtgttgaataggagtgatgatctggtttctcactgttaagtgtgttaggtgttagggtttttgtagatattatttatcaagttaagttgaggaagattctctgtattcctggttttttaagagttatttaaaaatcatgaataggtgttggagtttgtcaggtgcttttgctggatccattgacatgattataaatacattttagctgttgatgtggtagattatattgaatattcaatgtcaaaccagacttgcatactagaaaaataccatttggtcatgtataattattttttatacgttttggattcaattagatgattttgtgaggaattttgcatctctatccatgagagatattggtctatagtttacctttcttcttatgtcttattatcctattaatgtccatgggatctgctatggttggaaggtgtcccccagactttatgttggaaacttaattttcagtgcaaaggtgttgagaggtagaacctttaagaggtaattaggtcatgagggttctgcccttgtgagtggattattattgtgggaatgggttacttatcacgggagtgggttcctgactagaggatgaatttggtcctgtcttgcacattctcaccctcaccctctcttgcctttctgcctttccccatgagatgacacagcacaaaggccctccataaatgccaatgctatgcttttggacttctcagcctccagaaacataagctaaatcaatttctgttcattaaaattacccagtttgtggtattctgttatagcaacgtaaagtggactaagatagaatcagcaacaatgctctcttttatttatgatattagtagcttttgtcttctctctttttttcctggttagcctggctggagattgtgcaattttattgatattttcaaagaaactgttattggttttattgcttttctctattgttgttctgatttcaattttttaaattatcatttctttcctttatgctgtatttaatttactcttctttttatttttatttatttatttatttatttatttatttatttatttttgagacagagtatcgctctgtcacccaggctggagtgcagtggtgtgatctctgctcactgcaagctccacctcccgggttcacaccattctcctgcctcagcctcccgagtagctgggactacaggcacctgccaccatgcccggctattttttttttttaatatttttagtagagacggggtttcaccgtgttagccaagatggtctcaatctcctgaccttgtgatccgcctgccttggcctcccaaagtgctgggattacaggcatgagccactgcacctggccttactcttctttttctagttacctatggtgaaggcttagattattgattttaaatatttcttctactctaaaatatgcattgaatgctatacattttcctctaaccactgttttcactgcatcccagaaattttaatagattgtatgaatattttcttaagttcaaattatgtttaaatttcttttgaaacctctttgacctatgtactgcttggacatttgtttaatttctaaatattttgggattttccagctataattttgttattgatttctagtttaattccactgtggtctgagagcatactttgtataatgttcattcttttaaatttgttaagatgcgtttgtgtcccagaatgttttctttcttggtgaaatgctcggtgagtttgaaaagaatgtgtgttctgccattgttagatgaagaagtctatataagtttattatatcaagttgattgatggtgctgtcagttcaactatctctactgattttctgcctgctgactctgtcagttactaagagaggggtgctaggtctccaaatataattgtggctttgtctgtttcttgtggttctattagtttttgtctgatatattttgatactctgttgttttgcacatacacattaagaatggtgtgttgttttagaaaatgttatcatcatataatgcccttccttatatgtgataatttttcttggcctaaattctgatttgcctaaaattaacaggtacttcagctttcttttgattagtgttagcatggtatatctttctgcatttccatagttttaatctagctttccctttatatttaaagtaggtatttcttatagacaacataagttgagtattggtctttgatccaccctaatagtctctgtcttttaattgtcatagctagaacactctcattttaagtaattatagatgtagttggattaatatctaacttactggtatttttaaaatttgttgctcttattctttgtttctttttgtcttccactcttttgtctgcctgctctggttttcactgagtgtttcctatagttccattttctctccactcttaatatatcaaatatacttcttaaaaaatttttaagtggctatcccagagtttgttacatacttttacaactaatccaagttcactttcaaataacactatactgtattgtgggtagtaaaagaaccttacacagaatattcccaattcctcccttccatctcttataacattgctgtaattcatttcccttatctattagttatactcactgaatatattgttgctattattattgttatctgttagaataattaagattgagaaaaataaaaattttattttacctttatttataatttcttcaaattgctacttttcttcatgtagaactgagtttctaatctatattatttttattctccccaaataattttttaaaacatttcttgcaaggcaggtttactaatgacaatttttttttcaatttttgtttgagagtctttatttcgccttcattttgaaggataatttcattggatatctaggttagtggttgttttctttcaacgaattacatatttccattcactctcctcctgcttgtatgacttctttttttttttcttttttttgacagagtctcactctctcactcaggctggagtgcagttgtgcaatcctgggctcactgcaacctccgcctcctagattcatgagattctcctgcctcagcctgcctagtggttggtattacaggcatgccccaatatgcctagtttttgtattgttagtaaagacgaggtttcaccatgttggccaggctgggcttaaactcctgacttcaagtgatctgcccaccttggcctcccaaagtgctgggattacaggcatgagccactgcacccaaccctgcttgcatgatttctaaaaagaagtctatgttattcttattgtttttttttttcttcaggtaagctgattttttattctctaaattctttttagattttctctgtcattgatattctgcagtttgaatataatataccttggtgcagtttttgatacttacctgcttaatgttttctgagcttcctggatctgaagttggtgtttgtaattaattttggaaatttctcaaccacttttacttcaaatactttgtttttctctctttattctccttgtggcattcccatgacgtgtatgctacattttagtaattgctctacagtacttggatattctgttctgtctttttcatccatttatttttttctgtgaatttcaattttggaagttcctattaacatgtacaaaagctcactgattctttccttggcggtaatcagtctacttatgagttctttaaaggcattcttcatttattacctttaaaaaaattctagcatttcctttgattatttcttagaattttcatctctatatttatattacccatctgctcttgcatgttttccaattttttctattagaacccttagcatatttatcatagttatttaaaatttccagtctgataatttcaaaaattctgccatatctgtcttgttctgatgcttcctttgcctcttcagactgttcttcttcttcttctttttttttttataacatgccttgtaattttttttttggttattgctgttgttgttattgaaagatgtatcaggtaaaaggaactgaaatagtatggttagggaacattgtgtaattttaatatttttaaattgattaaaattaaaattatgacccaggacatggtttgtcttgatgaatattccatgtaaatttgtaaagaatatgcattatgctggtggtgtgataaatgttctataaatgtccattagattcaattggttgatggtgttcagttcttctctctctttgctgattttcacttgttctatccataactgagaggaatatgttgaattatctaactataattttaaatttgtctatttgtcctatcacttctatccagttttgcttaatgcattttaaagctatattgttatgtgcatacatatttatgtttgtactgacttcttactgaatagacatttttgtcatttgtctctttttctatctggtaatttttcttgctctgattttctccttatctaatataaatataatcatttcaggttacttttaattagtgtctccatgatgcattgttttctgttcttttacttttaatcagcattatattttatctatctatctatcacctatctatctatctatctatctatctatctatctatctatcatctatctatctatcttatatataaaatcagccatatttatgtgagtttttgttgacagcatacagttgggtcttttaaaaaaggtcaatttagtgtagacagtgtctgtcttctaattgatatgttttgaccattcgtatttaatgtaatttattaaaaggtttagatgtaggcctaccttttatcatttgtttttagtttgtttcctaagtttttaaaaatgtgtgtgtgtgtgtgtgtgtgtgtgtgtgtagatagataatacatttttactgtggtaaaacacacaacataaagcttacaattttaattattttaagtgtacaattctttggcattgagtacattcacaatgttatacgaccttcaccactatttccagaacttttttatcatctcaaacagaaactctgcaatcattgaacaataacccccatttcttcctgcttccagttcccttgtaatcattattctactttctgtcactataaatttacctattctaggagcttcgtatacaaaaaattaggtaatatttgttattttgtgtcaggtttatttaacttactataatgttttgaaggttcccccttgttgtagtatgtatcaaattttcatttccttttgagattgaatgatattgcatatatacaccacattttgtttatttacttatctgctgatggccatttgggttgtttctacaaattggatattatacagaatggtgctatggaaattgatgtacatgcatttgtctgagtccttgctttcaattattttgagcatatacctagaagcagaattggtgaatgatgtggtaattctatgtttaaaaatttgaagaactgataactattttccacagaggcttcaccaatctacattcccaccaacaatgaatgagggcttcaatttctccacatccttgttattttgttattactcttattttttatgaatttgatcttgtatcccattgtggttttattctgcatttccctaatgaatagtgaacttgaatatcttttcatgtgcttactggtcatttgtatgtcttctctggataaatgtttgtttaagtcctttgcccattttttaattgggttgcttgttttctttttgctatagttgttgattttcagtaattttaaaaatatattctgactttttaatgattgccattctaactggtgtgagatggtatctcattgtggttttgatttgcatttctctgttggccagtgatggtgagcattttctcatgtgttttttggctgcataaatgtcttcttttgagaagtgtctgttcatgtcctttgcccactttttgatggggttgtttgtttttttcttgtaaatttgtttgagttcattgtagattctggatattagccctttgtcagatgagtaggttgcgaaaattttctcccattttgtaggttgcctgttcactctgatggtagtctcttttgctgtgcagaagctctttattctggagaggatgtggagaaataggaacacttttacactgttggtgggactgtaaattagttcaaccattgtggaagtcagtgtggcaattcctcagggatctagaactagaaataccatttgacccagccatcccattactgggtatacacccaaagggctataaatcatgctgctataaagacacatacacacgtatgtttattgcggcactattcacaatagcaaagacttggaaccaccccaaatgtccaacaatgatagactggattaagaaaatgtggcacatatacaccatggaatactatgcagccataaaaaatgatgagttcatgtcctttgtagggacatggatgaaattggaaatcatcattctcagtaaactatcgcaagaacaaaaaaccaaacactgcatattctcactcataggtgggaattgaacaatgagaacacatggacacaggaaggggaacatcacattctggggactgttgtggggtggcgggaggagggagggatagcattaggagatatacctaatgctaaatgacgagttaatgggtgcagcacaccagcatggcgcatgtatacatatgtaactaacctgcacattgtgcacatgtaccctaaaacttaaagtataataataataaaataaaataaaatatatatatatattctggatattaccattatccaatatgtaatttgaaaatattttcttcccactccatggatcattcttttactctgttcatagagttctttgatgtacaattgtaaaaattttgatagagacaaaattatttggcttttaaatttttgcctgagtccttggtgttatacccaataaatcattgccaaatgcaaggtcatgaagattttcccctatgcttttttctttctttttttaaagagttttatagttatagctcttttgtttattttgagtcaatttttatatgtggcataaggttggcatacagttttattcttttgcatgtggatagccagttttcccaccaacattagttgaaatgtttgtctttcccccattgaatggtctttgtatcctttttgaaaatcacttgttcttgtatgtaagggtttatttctggcaattcgattcattagtttatattatctgtctttatgtcagtaccacactgctttgattactgtagctttgtggcaaatttttgaatgaggaaatgtgagtcttctaccttgtttatttttcaagattatttttggctttttggggttctttgagtttccaaataaatttaagatagatttcctatttctgaaaagaaacttcattggtgttttataggaattatgttgtattgatatcttaacaatactaagtcttcaaatctataaacacaggatatctttccatttatttatgtcataatctctctcagaaatgttttgcaattttgtgagtacaagtcttttgctgcattggttaaatttaatcctaagtattttatttttgaatgttaacgtaaattttaattccttcttaatttcttttcaaaattcattgttaatgtatagaaacacaactgactttgtaactcacaaatatgttgactcttattagttctaacattgtttttaatggaatatttagggttttctatatgtaagatcatatcatccagaagcacagatgacaggtctttcttttccatttggatgtctgtatttctttttcttgaccatttcctctggttaggactttcaatcaattgttgaaattaagtcttgaagaccaacatccttatacaattttagtcttagaaaaatagttttcagtctttcaccattgaatctgatggtagctgtggcttttaatatatggcttatatcatactaaggaaatatccttctattgctaggtttttttagtgttttaataatgaaaggatcatcaatattgtcaatgctttttctacatcaatcgagatgatcatgtcttttttctttattctattaatattgtgtatcacttttgatttatatatattacattatcactggatatcagaaataaatctcacttagtcatggctttggcatctatctatctatctatctatctatctatctatctatctctatcatctatcaatcacctcatcttgtctatgttctaatgcacctccttatttctcttcttgttgtgggactttaatgacatgtgtattagaccttttggtacctttccacacatctctcaggctttgtttcttttttccccaattattttttatttttgttgttcagactaggtaagttttcccagtctttcagattcagtgactttcttctttcatctccatcaatagcagtattgatctcattcaatgaatttttttaaagtttaattgtatttttcagttgtacagtttttattttattcttttatatatcttacatttctgtgctaagaccttatagtttttcatttattttgaaagtgttttcccttatttcttggaacatagttataatcactgcttaaaatctttggtagttccaacactctgtcatctccaggttgttgtctatttgtcattttctttttctttgagtaatctagagaattttctgattctttatatgtcaagcaattttagaaggtatcttagacattttgagtattatactaaggggctctgggtcattttaatcttttgaataattatttattatttatttattgttactttgttttatttcagtaggcaatcaaccaattatgatgttcaggctgcaagcccacagtctgtgtgttgtggttccaatttaaattcagttttcagagtgcttacaagggtattcagatgtgttcttcatgtgtgtcacccagtgcccagtctgggacctgggagttattgtagttctcaatgccttaggtatgtttcttaaggccagattcatgtacacactgcttgggtataagaccaggagttcatacacaactttttagaatcacttccttgaacattgtcttttccactctgtcctaaatactcatttactcctaaagatttttcttcctggcctgattagtgtctctgctccactgttcacttcctgaaactgtgttatctccagggtcaagtggcaagatgatagagagaaaaaggcatgtggcttattcttatgcttttgggaccacagtttctcttgtaaaagagaagtgtttccctccttcatggctttaggcatgggaccagctcctgttgttgctctgccactgtaggattgcctagtagctagagtaggagagaataaaacacaaacaaaaatgcagagaattttccccactatctgacttgtagagttcccttttataattttttgatcaaaaataaagggcctatcttaagtatttttctgaccatgcctggtgcacagttgcaggttctgggctgccttcaagttcaggctgaacaaaacagagaaaggaaacaaacagagactcacttccattttggcagcattttggtatctgttttccttctctaatttgccttctacttaaaaaagattattcaattttattttatttaaaaacctatgatcactgctccatctagtctgtccaggattttagttgtagttggtgaggaggacagagctttctccatattaactaaaactagaaccctggcagctattcttatccccattttacagtcgagaaaactgattttctaaaattccattctgtttccttttgttttgtttctttctaaaatccaatagtactaaaagacagaactaacgttattctatctcatcccaatgctccttatctacctaccaactatcagttcaagaagtcaaaacctgatttgaagatgtggaacagagaccaaattacagatgccacaagctgacttagctcctgcctaagtgagttatgagagcaagatctcttgcctggaggtcgggaagcctatattctactttttttcttttttgcccaaatctttagtcaatcctggtcctatctcaggaaatgggttttatttgtaaaaaaaaaaaaatatatatatatatttagaaatatctctaacgattctccctctgctggcattccatgattagcagaaaatgtcatccagagtctcagtaaaggaagaaaccactggagactgagttatataggtatgatcccatgcaagataaatggggctcaagtagtactctgcttgatgtttaagcaagatttattaacacagggaaagagtagggtagtggcagacaaccctagctttgtggcttccagcagttctttttccttctggttacatcagcctcaaccattcctcccttacattctatatttgcatttttattaggctgtgccatcctcaagcttgggagtggacctgagattggcaagaaaatcagcatattttatcctcctcttcgccatagagatgggtgcagggatagccacatgacccacacctattcaatcagagccttttgttctggaaaaaaaaaaaaaaaaaagtgaaagaggagctcgatttccctgctctatttagtaagctggcaagtgcacagcaaatgctcttgatggtcatcttttccatatgagggaagagtttctgtagggtgaagccaatgtagaaggacttgaagccaaggagatggggacctacagagtcttaaagatgttgtttgagactctagattcagccacaccagaagccagctccatttagatttttccatttaggtacataataaattatctttgtgcttagaccagcatgaatcgaatttctttcactaaccctgatggatatcagggtgggctaaggagctaagtagtatggcactgggaagaagacaagaatgaacctagaattttgggggactgcagcagagatactgagaaccttatagcaggggtggtttggcaggagcaatgtgaaatgaagtctatgaatagattttttgccagatcttggactgtttgtttcagaaggccaagatgtttgaatttttttcttgaagacaaagactgaagaggtacctgagctgggctggtgcagcttcagcttttcagagaatgcaagttaatgtggcagcaaatcttttacagagaactgatcagagatcccccaaaagtaaggggtgagttagtcattgatatggtttgaatctgtgtctccacccaaatctcatgtcaaattgtaattcccagtagtggaggtggggcctggtggaaggtgattggatcaaggaggtggatttcttgtgaatggtttagtaccaatcccttggtgctgttctcatgatagcgagtgagctcttgcaagatctggtcgtttgaaagtggagcatctttcccctcactctctctctctcctgcttctgcttctgccatgtaagacgtgcctgtttccctttcaccttctgccatgattgtaagtttcctgagtcctccttggaagtcaagcagtttccagcatcatgcttcctgtacagcctgctgaactgtgagccaattaaacttcttttctttataaattacccagtctcaagtatttctttatagcaatgtgagaatggacttataccgtcattgattgctctagctctgctgttagcagtgccctaattgacaaaatcttgcaccaggtgttgcaacaatggcttcatctcaggcaatctggaaaaaaatcaacattttcacttgaaacctgtggagcccaaggacccaaattctagtcccacccaaatctcacccttactagttctgatcatcttgagataagtattaatttggtgttagtttcctcagcaatctctagtttgtgtttgttttaataataatgactgtcccatttagttggtgtggccctttgaatgtgaaatgaaatgatctctgtgaaaaggctttgggaacttggagagttaagccagtccaagggaaagtcactcgagagatgcttgaaattcttgagtcctgcgcactgtagattttctgctttcaaagagctttgcccctgctctacgtcatcctgaagtggaaagtggtttcaattccattaaatcgaagaaaaggcaattggagatcctaaattggtcatggctgccctgggaggtagtgagctccccaccacagggaggatttaagcatctaaataaatacctgttagaggggctatggagatttctctttcctttgtagaaagcgattcataacaggctctgttttgggtgctaaggtctggtctgtccggttcgttaattctcagcagggtgacttcccatttgtaacctgtgcaatatcattgtccctttaaagaaattcaaagtgtgctgtttcgcgacaggtttgctgttgttatttagtacttttttgaattttcaaaagcctgtctctccctctgcttttcaatactaccatctccagccttctggttcacaaaatccaaacacattgtcctgcataagtaataatgaagaaatctacaagaaaagatttgtggcatttgctaatcagtttaataatggaggatatttccaccacattatatggagacaaattaaaagggcaaggagagctcccagaaatcatctgttcgtgttaacaaagtgaatattaatgaaaaacaaaattgagttcctcttgagtctgattttcatcaaatcatacaggtattaaaaaatagctatagaaatcctatccattagtagttaattcaaaataactttggcctctgctctatttttgactattacccctctcatgggcagagaagccagtcaccttgctggacccaccgtgccatgaggatcaataatggagctaatttagttctttatggaccaaatatctagacagtggaaatgggaattaagttaatgatgcccatggatgggaagaggggcaagaggggcaccagggagcactttgcttgtttcctctggtaaccaggttcgggttgcccagatgaccaatgttctaaatcctacagaactcagacaccttgcagagaccaatatggcctttccaggagaggggtcatgcccaatggcttgtgtccaccttctgggcctctctctgcctttgccctgccctaagtggcccagcaggggtgcagctcaggatgaggaagggtctgaaatgccatgggctcacccagctatcaacagtgaggtgctggggagtgcctccaagaggggcccaacataactcactggagactgccactagtactcccctttgcgggtggacggaaggttaatggtgattcccatattataatattaggacacatttgagatttgtggggaaagaaaagggccgggagggaattaacagcttctggtgagaaagaggcaaggacccttggtgtgtacaggctctcaggccagctccaggacacttggagtctttagggagaagggaaggtgccaggaagaagaagggaaaatatgggtataagcaaaacacttgggaagaacctgaaggcaaacatggccagactgcatgtgtgtgctgagggctgaccactttatctacagtgtgactctcctacctcggcgatgtcgagaaaagctgtgttcactccagccagcttctattacttatcacatctgacatggccagaacctgggaggagctggctgtagcccctgaggtatggtcaggataccaggatacggctctctgaagctccttgctgcatcccatgtcctcagaagataccatcagagaatggtcctgtccaggaggaaatgtctctggaactctctctccaacaaaatagaaggccacagaatgccagcatcatgctgtgtttgtgtggaagtgatacaggctcctctccataggactcaagtgagtcccttgggctggactgggaccagaactagttcttggtccctcctccttgcttcaagtacctgggccagatggatggacataactactacttcctgacagccaccctaggctccgagctctctctgtggaccagtttcctgggctgactcatggtttttctgtttgcctgtaacataggacttacatgcttgccttgcacaggacttttgacttgagtcccagcttttaatagcttctgcctcagctccctccagtgttcggattctgtttctcaatagccaggaatagttaggaatgctttcagctgcaaggaaaagaaaaccaacaaagggttcagaaacacaggaggcttgttttactcatacagcaattattctggttacagatatttcagtgcatcaacaatgccatctgcacggtctgtttttctcctccgtcctcctcagctcattggttttattctcatgtttgcggccttgttgttgcaagatggctgctcaaccatcaggtgtcacatctacatttaacgcaggaaaaagagagagaagggcagtggcaattgccttttccatccatctggggatgtagcttttccatccatctggggaaacaaagactcccttgacagacaggcacctctctactggctaaggttgttggggaccaaccatgcagtggctggattttcctagagccagtccagttctggtatgtacaggacacttattgcaagaatatactgagtgtcaggccctatcttaggcttttgggggaaggaggggacagaggttaatggatggcaagctcattttcacggtagcctgggagaaactatggataagaatgctgcagacaacattgtcctcctcctgtcaaatgctgccaatccttaactagtgagggtgaatggtctgaccttagggcatgactaggttcaatgcccctgatgactactggtggggaagaggacagagatgcccaatactggacctggctgtgtcacttcaagtctgcctggtgtgaatgccccccgtcttcttccaactgtctgctatgcagggtgagaggtcggcccagccccctctctacccagacggccttgccagcccacatcttgcattcagacccggctctgagggcagcgggcaggcagtcaccaccctccagatgaccaattcaaaacacatggggacctttgcaagcccttggaagacatgctatttctctctgcctgcataattgttgagaaggaagccagagacggtgttctaattaattagagaaggtatttgaggatgccactgtgtgctggactcaggaccagaatccaaatgtcccacttatctgcctccaccactgcgaccctgagctgcccctctccttccctgcattcgtatttgtgtgtaaactgcagcttgtgaccgaagccttattagttggtcaaaattttacttttaaatggaccattaacctactcagaaaccaaagcacactggtaatgtaatacctcagcctcctgtcgggcctcagagtgaaccaggtcagaaacgacgtctatttctctccattatcccacagatatccggagcacgttctcacccacaggacttctcagtctggaaagacttttcccatgcagtttgttaatccaagctgtgccattgacttggacaagtcactttgctaccctaagcctctgagtccccatcaacaaaatggaactagctgttttattaaaaaaaataagtaaatctcgttgaccatcagggaggtgacaagtcacagagctgaaacgaaggtagcttggattccactccattctgggttgggaagttgggtgcttcccactgggcagttcttgaagctcccttctctgaaagtggggatgaagacatggataaaggtccttaagacataagagctccttccagtctcgtgggtcttctcggcagaacccttgcttggctggaattccatccactctctgcaaggcataacttcctgtttcctagggagaggggcttataaaaaggcataaaaatgaggcttctaaagacatcctggacgtcaactagatgttgcaaaattacattttgatgagttcagtgtaaatgaaccagaaacatatggattcaatttcccttggaatccacatgggtttaaaaaccaagggggcgggggagaatgcatttggggaagagcattttaggtctcaccaaaatccccgcatttgtaaacagcagtttgaggtttatgatgattgcgtcccgggctgggttcctttcctaataatagaatgtacaggatgtcttgcagcagcctcacaaaatgctttcagggaaaaatacccaaacgctgccctctccctgtgctcctgggttctatggaactctgcgatggcctcccagatttcctgccctgggtttgaccccataagtaccctctttgctccttctgcttctgcaaaaatagcatcccaatcaggtccacacaatcagtgactgtcaagtgccaggtttatcctagggatttcagcaagtgctacatttagtaaggtgggcagcaccacccctgctttaaaataagagaatcgaagtccaggacattcggcccaaggctgcttagctggtaggtgccagggttggcatgggaggccagggcttctgaactgaagtctggagatctttccaccataaaggatgcatttctattcctcagtttcagagaaggctaagaaaggtatctgtttatctggaactgctgtaaggtggtctaccaggaggctggaggaggggctaatgcagccattttcatggtggtcccagagaagtgcttggaattccccatggttccttggggagttccctgggagaaggaatagaaaagctgagagaaagaataaacttactgaacccccaggcccctgctcccatctagggaaacttgctctcctctgttctacctattgagctttcaaatatgtatttgattataggaagtttcacagtttaagtttcaaaatcatggatcctgaggatttttggtggccccccttttccctcctgccagtcaatgggttagtgttggcttcttgtctgcttttgtgctggggggttctgtacccactatcagatgggattgctggaactgtggatggacccacagagccctttgagggatgctttcgtgctcagtcctctgaccaggcaggaggcagaaatgcaggatgggaccctgcctccagcagacttgaaatctgattttgttgaaaagacaaaacccgcttccagaagtcaccttggaaagatgaccatgtgagataatgggcaggctggttctgggcatgggagactccagccctgtacagccatacactaatcaaacaatggcccaatagaaggcagttggatgggccagagctttggaggtagtgcttctgaatgacttggaccagagcacagaagggacagagacttcctggctctcagctgatggaaggagccacaagactccactgtattgggtctcccaggggaagagctgcctggccccgcctaggtacatcctgcaaagcacagccaggatggagatgggctggaggagccatctgattcttattaggctgtgcaactttctttattggcaaacagtctgtcagcagcttcttcctgcagagcggcccagatgtgcttacaaagcgttctgtgtccttcccgtccacacccagcccccgcgcgcattgccactttgccagacttcgtcctggtcccaggagtccagctgtggccaaagcaaggcttagtcaggagcctgaggaaagaggctcgcccctctgggtggcctcatgccagccacccctcgctccatgtgcatgggtctcattccccctcaaggtgcaggaggtgccctgggtggggttggggggggggcctggcctcactccttggggtgggggttggggtggggcagacagaaccctgccatgaacttatgtttgcacatgttcatcttcaacttgccatactactagggtggctttcatctgttattgggtctaaatctcctctctgagaattctcatgggagaaccacagaaaacaggagggctgctggcctctcatgggtgttcaataggagggctgacctcagaattcactcccatgattgtccaagtggcctccccatgtccctcttaagagagttcagtctcaagcatgtttctccccttgagaagctggaaaactggtgcaaaattgtgcctaagcataccacggcctgggggatattaaatgtttggaacaattaaagtcccattacatgaatgtccatggactgttttcctcccatcccacacatattgtctttctttaggtcacagaatcctgaatttcccttgggggaaccatgctcccttgactgtcataccctgtggtcatatgaaccaacgcattccctttctttacctatgttagtctcgcctgcctctcccaccacttatggccaaggctctagatggattcagggccccatacccaccattgacactggcctgccttttcctggtcattcttgtgtgtaagtaaccctaatgaagaaaaatgaagtgaggcgtgggtaattttccttcttgcatctcctgtgttcttccttaagtccttcaagtctacatgaagtttctcttcttttcttttttttttttttccggactgttctgatgatcataaatgaggatgcatacttcagccacaaacttacttcatgtctgatgttatcagccttagagatacccttgcctatgccttcttgcttagaggggaaacaggtctggaaagaagacaggagttctcagggtcatccagaaagcccacagccaaagaagactttcagaagctgcattggttgcaaagcatcaccttaccagcaaaggctattacctgctcagatgtcaccccagatctcaccaagccacccttcttggtccaaaagtgctctactgtgaatgtagtcttgtaggagtcttgatgatgaactcctcaccatccatcctctctgatttgataaaagtaaaccaattgtgaaaattaacctcagctcccaagacattcattggcatagaaagagaaataggtcttccttatggccagtgagacttaagtcagccaggagtggggcagaagataaggggcttctacaaaaggttcccttgctcctaaaaggagatataagagagaggcaaaccctttcttcttctggaccttattatttctacatgtgacttttgtacattgagagccagccatcttgagactcgaggaaagtgatcttgacaccaaaatctgggtgtgctgggaggacagaacggtgcgatgaaaggtccctgggcaatgaggactccctgagtgacaaaatcatcaaactccagagtcctggctgtttctggacttcttattttatgggatataaaagttcttattgtttgaaccagacagaatgggggtatcttcttctttggtactggagttgctctggtcagagtaagagaccatgtgccttagtcagcattacagggcatgggcatttacagcatgaattgccatctttattgacctttgtctctctctctgcctctttgctcttaatctatggcctgcctctcccccgtgtgatagctgttagagctgtgaggagccttaaaatcttcatctggttggggtagctgaagttcagagggaggaagggacttaggggcttgctcacgatgcatagaaagtgtggatccagcaggagaactcaggtctttcttgcccagctctaagctttctcatattgctcagctgtttgctgtcctgctctgtctgtctctctgtgtctcctccatacacctcctcaggtctccttctctttctgtctcctctgcccgagataaagggaccccttcacttagagctggatggggcagctctgctggggactaggggggtccgaaggagcctgtgctaaggaaacaagctggtgttgctggaaactatgtctagatggtcacagagcagcaggatggggcactgggattctgcgtgaatggccatcaggtggcgggacgcatggacggctcaccagccttgggaactggcagtgctgcatggcccagctcacggagaaggctcagctgtggctccttcctaagccatcctgcttcccactgacttggagagacagccggttggtgcggggtttgtgtgggtttatttactcttaataacaagcttatattttagatattccccctgggtatttctgctcatttgggcttcagtacaaaaccatgaatccacacacaaaatgtgtggatctgaaaattaggattacaccccagcatcccactaatagaggcagtcttcctttgaaggcgccagggatctctgtcctgccctggctggccaaaggaaagccacgatggggccatgcttgttaccagcgggttctggacgcatccaccaccatcagcatctgttctccccttgggtcttcattaattcagttaaggaaacatttaattagcaactgttgtggtcggatgcagcagtccatcctgggtagaagatacacaattccttactccaggagcttccatccatatgcggaagtgagaaggaagaatgtatgcacactggggcatgtaaagctctgccgtggagagtagagctggtgggtaaaggaggcctccaggatccatgtgaccctgcctgtggtcagaagactggttaagaaggcttcctcgaatgggttctcagctccaaactcacgcatgcctgcagtccagtttctaccggaaaagttgttcctactctcaacaattccacctgaagccctctcacctaacctccggcctgctcccaaccctccctgcacaaccaatgaaagctggcctcaagtaccaccaagaaaagcagaggccttgtaaggagtctcattttcttcccctaccaccagatggcgccccagcttggcctccgcactgatgggactctgagagaggaagcgtccctcttcatgtctaaggccaatccctccccatgcatcctcaatcccatctctctcttgttctcaaggccatggcctcattcggggtcccctctggcaccttgcagggtggatattctacccccttggaccatgcccatctacctacgaacaccttcactctccaccccaccctaatccagtttgcatctcgccacactgtcaaatattcatttggtgaatgtccccagtaacctccatgacgtccaccaatccaatagatgttttttgtgtgtttccttagatggaaatcctactcccaccttatgcacacgcacgttccctccctggctccatgttggttcaatccccctcttccactcaacctccaaatgttgagttcctaaaaactcagtcctacccacactctctctcaggtaagcccacccattatcccagttttaacataatgactgctcccaaatgtatagttttagtccagacctggcttgtgtatccaaccttgacttttcttatttcactctggctgtgtggcaatcctatcaagattaccacatccgaaactgaactcataactcataatccagccccaaccacccccatgtgactggtagaattctaagacatccccaaagtttctcactcctctcgtgcacatgccctgtatgatccctgggtctctgagtgccatggatcttcttttgatgattaggttatgctatacagcacagttgagtttaataaagggagattattcaggtgggactaacttaatccagtgagaactgtaaaagtagagagatttctccagttggtggcagaagagttcagaaaaactcaactcaaaggaggtttttagtgctgttgatgaggctccaggagtggcctctaggagctgagcatgatctgtggcctggagcggtaatcagattgagacttctgtcctacaaccacgagaagccgaactctgacaacaatagtgagcttcaaagagaactctccagatgacaaccacagcttggctgacaccctgatggaagctccatgagaccctgtgcccagagactgaccgatagaaaccgtgagctcatacatctgtgttgctttaagtcatgagatttgtgataaattgctttgcaacaatacaaattaacatatttccctatagcttttcatctcagtagacatcaccatcatccaccacattggttaagccagatatccttgagtttttcctttctcttactcccacatccaactcctcagcaagtcttccctcttctgttttaaaaactcgtcttgaacctctctatttctccccatcttagctgctcccatccttcctcagactctattacactttgccccatcactatagcaggtgttcacctccataccagggtgattcaatccattttccattcagcagccagaatgcttttctgaaaccatcaattgaatcatgttatctcctatttaaaatccatcagcaccttcctgctacatacacatcaggtgacatccaagcttctcactgcattctacaaagttcccaaggacctggcccctgcctgtgtctacaaactcatttcataccctctccctcttggcctggcaacaccagttatttccttcatagcacacatcacaagtgtaacttagcttatttaagtggtgtgtgtgtgtgtgtgggcgtgaatgggtaggtgtttatctttttctactagactgtagactccatgatggctgagatcatttctgtttgtgttaaccattatcatatacagggaaaccccttgcaacacgattttcctttggggctgaggtggaacaaaggctctttcccaggccgttgatgtgctttgtagaaagcaggagctccccgtgaagcacccaagtacaaagtgtactgatgggggccaaggaggggggtgggaaggggaacaggggtctcaagggttcgctgaccatgtgaggttagctagactggcctctggatccactggggtccgctaaagccctctcttccatgggggcagtctcagatttcctaccatgggccttgggcttctgtcccttggtcctttatttcaggtgccccacagaatggtgctgaatggtttgcagggatgtgcttctcttctgttcgcttaagacctcaaactgaaaaaatatgagggtgggcggtgactcactgttataatcccagcactttgggaggccgaggtgggcggatcatttgacgtcaagagtttgagaccagcctggccaaaatggtgaaacccattgtctattagaaatacaaaaattagttgggtgtgttgggacatccctgtactcccagcctgggaagctgaggcatgataatcacttgaacccaggaggcagaggttgcagtgagccgagattgtgccactgcactccagcctgggtgacagagcaagactctgtctgaaaagaaaaaaaaaaaggaaggaaggaaggaatgaaggaaatgaaatgaaaaatatgaaaatatccctctgccccaaagccgtcctactagaaccagtcatgacctaattcaataaaaccagcagctgggaaatgcagacctccactttatcctcacactgtctacactggcatccttctgccacaagggagattctgtgagcttttgtggacaaagctgggtctggacacccctggagatgagaagctatcctgggataaatttgaccctttgatagtggagagttgcaaagccactgatccactaggcttagctgctacactactggatgaagaaaatcgccttcatgagacacaagtacaggatgctttccttgcctggctgagggagggtctaccggaaaccccctacagactcctccaacccattgaatctccagtagttaaatgaaagcaccagacatttgcagctaagagactatgggtctctggagaagtgctggtcctctctgaacctcagtttctccactgtaaataggtttacctttcttcccccttgcccctgaccttggagacctattgcaaagatgaaataatatgcggaagtaaaaggcctggtacagagcttcatccccagcagctaagcagaggcttaaacgatggagtctatcatcattggtgatatcataaatgaactccttggcagcaccttgttctagagccacagctttgaaacctgctgaattgacagaaacagcaataaaaaattaaaagtcaaaaggctctggagtacatttcttaaagtatcaggctgtgtttttcccccttgtaagtttgctgagtctctggaggtcaccctgcaatgggccatcccttgggagtaggaaagcaagtttgaggccctaggggagaatagcttgggcccgggaaggggaggtcctggcctgccttgctccctgcagagcctggggacccatgtgcccagctgagggccctctagggggagaaaagcaggaggggaggaagagatatcagtgttttccaggccttgcagagagctgtggcattaaaggtctgaagaagcctgttggggaacttgcccagccctggtgaggctcacagaccaactctctggatttgaacatggcatcctgagctgtttctcctcatcctcagggcttctccaccggacagggctgcattcacgcagcccacaaaccaactgttctaagagctggtccaggaagtcttgtctctggcctgaggttcattcagggtccccatcgtctctcacattcaggctcaaaaaaggtgcagtggccaaacacgtgaatagtaacatacctgcttttgtgacacgcttgtccccttcttgggtggcaggtcccaaatgcagattgtttatgtagccagttgcagtgtaaaggctgtcatgagagacatgtaagaaatggagtgagagggttcagaagcattctatctgaaggggagagctctgtattaattagaagaaaaatattgattggttgtgtggcctcaagggcaaaaccccaaagacctgcagagaatcagagatggctgttaagctgctctaagtggtacaaggaaaatatctgtgcccccaagagcaaatgcagtgaatggaatgggatggatgttcaagacaaggtgctgcttgtaatgatccctcatcatgaccctgtgacttcagtaaatatgactaaactaataaaatgcctagtaagagtggagtggaggtggaaaccatacataaaatcatgtttcaactcaggtttgactcaaagagaaacaggaagctagcacaggtcagaggagagggtgagttcccggaagctcccacagttcatggaatgtgttttggactttcagagactgggaaaatgggggtagggtggaaatttgggtaaagggtagtcagatctacgagaagcagtgacatcccagggaatctcagggtttgatattattgcataataaagaatttaactggcctctgtccctggttctggggatacagactcaacatccttggaattttccaagtattaggagagtgcctttgttcttcatgagctcttggatctcactggagttcatgcccatgagataactcaggataggggctagtcagtcaccagaaaggcccatcatggtctttgagccagctggacctccagggaggggctggagattgagttcaatcacctggtcaatgatttaatccatgagacctgcattatgaaatcccaataaaaacttcggacattgaagctcagtggtgcttcctggctggtgaacacattgatatattaggagggtgatacatcccgattccatggggagtgggtctggaaactgtgtttgggactatgtaaggtatcactctatgtatctctttatttggctggtcctggtaatttatcctttgtaataaaacgtaatcataagcatagtgatttcctaagttctggaagtaattctagagagttattgaacctgaagggagttgtaggtctccttcagagttggtaccagttggtcagaagtgtgggtgctctgggacctctgaatttgcagcacgtatctaaataaagtgagggcggtcttatttagcctgtggagtctatactaactccaggcaattagtgtcagaattggactgtaacacaccagttaggtaataggaagtgagtctttcattatgtgagtccttctgcttcctcaaacctatttggtaaacactccaagtataattctgaataagaacaagcctttttgttccccacttgggtcctaggacctggcaaaatgcagccttgggtgtagctacattgttttgtagcctcattatgtcccttctccaaagacagggtggcatgagctcagggaggggctacttgttctggggcgggctggttctttggaagggcacaagcaaaccataaacaaagctccacctttgcaaaggcagcaccaggacttctgtttgggaggtccttgggatgacaaactggttctgagatgtcttcaagatgcttctgtataacaagcatatgtttttgactttgattgtatgtttatttaaggaggctcagggagggctgatggaagttatagggtggggacggctctgatccaacccaagcagctccttggcccaggcattttccctttggtgaggcatgcagtccctaaagaggtaagtgtcagagaaggcccagattataaatctttcccccagagcaatgcagtttcattgtacttaaaaataattaaacaaatctgtaaaacatgtttccattgcattagtttacttcacttggccccgcaatgtgaggatcataattacttaaatatttccctttactatttttcaaaacatttttctaaattgtcgaaaaacattctggagacagttggataaaaacatagtgaacatgtgtctgattaattttttaagacaatcgagatcaaatgcaaaaaatgattggaaatggtttcagagtgacaataaaagacagaaatctcagagcggggagtgcggtgactcataaggcagaaaggatttatcatttttactacagtatttatttgaacgcacatgacagggagcgagctggcctggtgtgcaaattgccaaaggtggagtgtggcccgaggaggctgtgtccagttagggccattcccccaagtgggctccaggaccaggctctctcctgatgccgagcttgtaaaacaagagatcactctcagcagccattctttgtctcctgtcattacaaacaactcgagggcaatccgctggcttctcgacaagcagatctgtccctcatctgtcagctgacaatcaggccaccatcccgaggccaccgctcgggctgccgggtgatggaaagccacttgtcaaaggagggttgatgatgtttacttacaagcacttcctaagcttgaactgaatttcatttgactttattcagtttattttgttgagtcctttttttaaaacttattttttaagttccaataaacaatagagatcacggaatgtgatttctttttctagcaaaacagtcctacccttctgccctccttctctagcatccattgtctgagaaatgtcacaaggggaagagaggccgggcctccctctgaattctttgcccttccaggggtgatacggtttggctgtgtccccatccaaatctcatcttgaattatagctctcataattcccacgtgttgtgggagggacccagagggagataattgagtcatgggggagttttcctccacactgttctcatggtagtgaataagtctcacgagatctgatggttttataaggggtttctgcttacacttggcttgcattctctcttacctgggtgccttgttggaagtgtcttttgtcttccaccatgattgtgaggcctcccagccatgtggaactgtgagtccattaaacctctttttctttataaattacccagtctcgggtatgtctttatcagcagcatgaaaacagactgacataaggaactccaagaaggttccaggcggggacactgcagccagatcatctatcagtttgaaggatacaacccctattttgctgaatgaatttgggtctccaagcatggaggtgcgtacgctagggctctaccctaaatcccaaactggaactcttttgaagggacctcaacatattgaaggtcatggccctatcaatcattctcatatccccatgacattttctttattttgtccttaagacaatttgtattattttttatagtgcagagactaatatgcctttttgtttgaaatggccagatataggaggttgttgtcccaggtttcacatcacagataagtatctttgtttcaactggaagaaaaggacaggcaatgggggccggtcttgcccgtgatgtcccaggccattcttggcacctggagttggtttgagtaggaccctaagtcctggattctgggagcctgggccctgtatcatttgctgagggcagttaggcatcgtctgctggaagttggggtgctctttggtggcccatgcacagaagggaattgtcaggctggagtgagataaagtgattgtccacctggtactcactggcccataatctatccctgggaagctgtgttcagggctggaaggtcagctttattccctggtcacccatgctcttactgcttctgaacataaggaacaaacagctcaccttggccggaggtataacatgttcatggaggtgaaccaaatagttagaattatatacaatcatggcttggccccttgatgttcattcaagtcaggtagagggtgctctaggagctcacaggtagtgggggatgaaaagtggatgtgggtgagagagggttgaacacacacacgccacactcaggtggtgggctgggccagtgagcaccttaggctggtgcctaaggaagatgtgggaggggctgaggcagggagtggcctgggaggatgatggcttcagggagagctcctgtccacactgcagggatatttgctgtgctgccctgagatttccaaaatctaacgctgaactttatcttacttctctcttctccaagacttgagtttctaagctttgaacattgtggtggtttggatgcattttgcagccataatttggtgaggatttcttgccaatctttgtaatcattggaggtcctggatcccgaagatttaagggtaggggcccagacctaccacccagagtgctgagtgcctgtggaagcaagaagcagagaagggggttggggcagggagctgcagcctcacgtgagacacctctgccctgctggctgcacccctcccttttgttgccaattctttacctactaaggtgcagccagatggaaagaaaccttgagtttaactcctttcttgagagtggcatcaatcatgtgccacctttgctagggaatccgagggcctcgtgaataattcagaaatgctacatagaatacttgttactcccaagtgttaatgaaaatatcaagggaattaattaacagtcaattatatcaattttagagttggacattgattctgatgctgagagctaaatctgaatttttgctacagttccttttcctaattctcaacttgtctttgtcatttctagtcaaacttataggggggaacatgtttgaattattttcattgccttgctgtatttcagcttacttctgataaataaagattaaaaaaagaactggtccagtattacatattttctacagctgtatgtgtacatgtagaggtgttatcttggtctttgtattaaactgcttgggggaaaagggagtttcaaactatggataatacattaccaacaaaagcgaaaaagcaaaaataacatgcatactatttgcatagaaatgtacatattttacccagaccatcacatggaagagctcacaagagatgagaagatggaaaaagaaaattgcaggtagtgttttcaccagttgttgatgacaatgggagcataggagtctgtccatcctgaatgtgtgacaagttttctaggcatttgttaaacttcacatatgaagagatttttcaacccctctctgatctttgatattaagaaaaagcatttcattgaaaacagtctttgcaggatttggcacgagtcgtctagactgctttatgaaaaatgacagctagtagaaaagtaattaaagatgtattttgctgaaagcaaaagtatttttggaatcaataccaactatctttaatttgccagttctttccacaatcattgtgtgttatctggaggatctcaattctagagaacggaggtgccagcccctttctggtcttgcttttacgtcctctgtctgcttcctcaccatcctcaagtaaggttagaggagggctgggcagggaagaagaggcatggtcactgtggtggagcaggagccagtggatctctcccaggaaagccagctgctcaacgagctcctcccagggcagcagagatgtttgaaaagtagcagcaatgaatccaggtgcagcaaaagaagcggttgttggtggtggtaactctggttttaagttggaaacaaaaggggaaggcagcttcatttatgcttttgagaagttttgaggcagaaagacagccctcctaactcttctcctctctttgttgttgttttgttttttttgagacagtcactctgtcacacaggctggggtgcaggggtacaatctcagctcactgcaacctctgcctcccaggttcagccgattctcctgcctcagcctcccaagtagcttcgattacaggcatgagccaccatgcctagataatttttgtatttttagtagagacagggtttcaccatgttgtccaggctggtctcatactcctgacctcaggtgatccacttgcctcagcctcccaaagtgatgggattacaggagtgagccactgcgcccggcctcttcacctctctttatgggaagcatttgccttagctggttgggagctccctgcaggtggtcagggctactcttcccatttctgtgcgagataccaggtaaaccacatgtactccatatgtgcttgggtgtggcttgattgatgatgacaagattaggctcccagcctgcagggtcccctttttggccctattctccccttctctccctcacatatcctttcttcacctgcctgacactcactcatctttcaggagtcagcttagatgacacttcctccaggaagccttcttggaatgcctcaccaccccagttgcatctcagaagatcagctctttttccacccaattccatcacgctgtatttggttaatggtctaacttccttagaatttctggggacaagggccagaattttctcaccaattttctccctttcctagtatggggccttgtactgtactccttgtgtttgagggagtcagaggcaggggctgaggacaacagacagcatattgtaactgcagtcatgtttctgccatgtgtttctctcaccctcttagcctacaggtctctgggtccatgggagtggtcccagggtttgaacagactggccttttccaggtctctctgtgttagaacatgaaggcctcttccctctcagcaccagagaaaagctggggtcaatgggcagtgagccctccaccactaggaggacactgggaacccggcactcgttaggactgatgggcaggtggattgaggaggtgaggtgactgagggactgaggatgcctgggtagcaccatggctttgtgacacttgaatctgccacagctgtggggccttcccaggccactcttcaggccatagagccctgcactggccaccttcccctccacaggccagggggtgaaccccaccggcatggtcgggggtctgtgtgctctgatcctggagttgtggggttcctctgggggaactcagagagcatcatactagaagtggaaggaggctgagcgcaggggctcatggctgtcatcccaacacttaggaaagctgaggggggagggtctctggaggccaggagtttgagaccagcctgtgcaacataacgaggccctgtctctattaattttttttaattagctgagcatggtggcatatgcctctagtccctgcaccttgggaggctgagataggaggattgcttgagcccaggagttcaaggctgcaatgagctatgattgtgctattgcactccagtggctgggcgtggtggctcacgcctgtcatcccagcactttgggaggccgaggcgggcggatcaccaggagtttgagaccagcttggacaacatggtgaaaccccgtctctactagaaaaatacaaaaattagctgggtgtggtggtgcacgtctgtagtcccagctactcgggaggctgaaggggaggatcttttgagcccaggaggtagagattgcagtgagccaagatcgcaccaatgcactccagccttggtgacaatgtgagacccttatcttttcttcttaaaaaaataagaaagaaaaagaagtggaagtcaagagcacctcacctggccctctgttccctcctagctagaacaagtctgcttctaccttctttgtttcaacaagagttcctgtgacacacacactatatatataattgtgaaatacataacatatatatgtgtacacacatcatgtggtgtatatgtgtgtatgtataagcacatgaacacatacaacaaactcccactcattgttttgcttgcgaccacgtctgtgcagcaaacacattgagtcttagcactaaagttgtgtcaacatactcaaagtcacatgtacagctgagctgaagggagggtgctgtcatctggcccaattttcaacgtctgggtgatgtggattttcattgctttggatcttaacgaggcattaatttttttccctcattgacatgcatagtcagacatagttaatctttgggacacttgctggtcagatgcctgggataagtatggattaagggaattctgattacccagagtgcaaggaaacttgggaattcaggcaacgagggggtgtttttgtaggtggcagagctgcccgtggcagagcaagttgtatccagaaaggattttgatcaatgaaagtttctgtgttggcagcatgtggggtttactgggaagatgggccccctgtgttcatgtttgcttttcaaacctgtctctatataggggtggaatctgaactcagccttcctgggactctaccttcggctctggttttatggccaggtgccacatctatggagcaatgctgctgcctccccatatgaaaatccttaatctactgaaaaacccagtcctggactagcctggatagagaggcagttctataaatcactatttatcacaaactttattgttagtgttccacagtggaatgtaaactccatgaaggtatgtcttaaaattatttgcaaatgaatggctcctcattgagaaggttagctctagacctcagccaggatgtgtgcctgtcaccaagtccttcctgcactcacagtgccctccacgttgtgccaggccctaggtggtctgagtggaacttgaccaaaaggaatctttcctccagtctggcctcagacaattcacccccactgtgtggggtaggatggatgctcttaggttttctgccatgatctgatgtcttagtagagctgtatgctcctggatttcagtcttgcctttcccagagacattctctgctgtcataaaagatccttcctttctctcacacacagcatcagtgatgctacttctacttgagggaggtgtggtgtcctctaacttcaattctaaagtcagcctgttgggcttggttaaaaaggtgctttagcccttcttggggagaatggagactctcattggagatccttgtgttggaggaggatgtgaaagtggattttaaagttaaatatatgtattactttgtaatctagcaaattgacttcttggcatatcttccttgtactttcttggatacgtgaaggcagatacaagaatatttattgcaacatttttgtaatagtgaaaaattgaaaacaatttacatgtccattaatataggaacaaataaaactgaatgcagccatactaaagaatcttatgcagcaattagaaagcatgagataaatctatatgtattaatatggatacgacttcaatggatatggcaagtgaaaaaaaagcatgctatggatagctacactggtttcatgaagtttatgttaagagaaataaagaataaataaatgattttgtattttctataagaatatatattttcatatatttgtaaatgattacaaaaggcctaagagtctacaccccaagtggattccagtagacactttttaggaaggagaaatagatttgcagaggtggacaacaggtatagactctgttgtttcatacatacatatatatatatatatatatatatagtaagtgtctgggtgcagtggctcacacctgtaatcccagcactttgggaggccgaggtgggcggatcaccatgagcttgagaccagcttggacaacatggtgaaaccccatctctactagaaaaatacaaaaattagctgagtgttgtggcgcacacctgtagtctcagctactcgggaggctgaaggggaggatcctttgagcccacaaggtagagattgcagtgagccaggattgcaccactgcactccagcctgggtgacaatgtgagaccctgtctcaaaaagaaaaaaaaaaaaagaagtgtatcttcttgagaaattcaacattctataagagttcaaagaattcaacctgtcttcaagtttactctacatacaaatctttgtcctgtcctccagaggactgaggctttaagtgacaatttgtgcagcatgagctgtgagtggatttgctgtgaaagagagagaagattaagacaagcctttgccttccaaagcaaaatgtttagagaaggaactaagacttatgccgaggaaatagggggcagagaatcccagagaggtgcagggcaggagggtaagggatccttctccccagcctggcccctggactcctctcactgctggttcaccagctccccaggatgggactcacctttgggctctctgtgcctgggagccactcccagtgatctcctcagaccacttcttccgttaaagcatggattagtctgtgatccctgggtccagaggatggaatggtgggttattgggaagggcaggagtttctgggaaggtttccaaaggggaggttgcacggagcctgtagggacatctttgttggagcaggtctgcattctgggggagaagcctggaacagtcagggatgtagtggcatgtgatttatggctaagacacacgccttgtctaccagccagtggttttgctttcaacagatcaaggtggccttgccacctaagcatttagcgaaaccctctttcttgtaccaaaagcctggctatggcccctctgctgctggagctggattggggtcagggcttcctgatatttgacttatagaaggttcaccaactcaaatgcactaggggacagataacagatgctggcaagtgccccttagagagaggtagagactggaataagcacacaccctctaaatacacacagccgaaaaattgcctaccattccatccaaaaatgcatgccatcgagccaaatttcccatgttgtgaatcctggttaaaggggagctagtgaagggcacagaatcaaggtttgtggagtgttggagttgattgctggtctcattactaagtgacactgacaagcacctaaccctcctcctcctgctgcacgagccttggttccacctgcaaaatgcagcaggaacacagctgagccacagggccgtggtgaatgattgtgaccaggtgatccagtgtggagcgtgccttgccctaagaaaggaattacactgtgctttgcttgaaaccaataaacacgcagtctttcatggcctcactcctcttacatcagctgaagccaactgctaactctctgcctcattttcacttcctaatgaagggaaatctaatatcagctttaggctggacgtggaaataacctagctcctccgatgtgaggagcgggtggaggagccgcggctcggctcctgcaatcctgctgcattgtctgccatcaccgctgggggcgtggtaggggaagaaatggtgcttagcctgtgtcctggtccccatgcagttgggagatggctggaaccccttccacctccttcagccgagacttctttgcaccatccaaaagggttaggactcccctcctcaccatgcggagaaaactttgggcggctgaccccaactctcctcacgcacagccaatctccttccaattctttcatcagcgttgggactgtcagctcaaacctgacaagtgacaagtctcgggctcatgctgactagataatcaaagtcttgtcagggctgtcaataccctgcagataggagaggacaaagggaggaaaggtttctacagaaaccgctgccttcacacaaacgctgtcgaagcctcttacccaaatcacctgtttgtccctaaacgtcatttactgctgaatctatgggctcaaaagcacaaaccctgaaaatgaaataatagcctgatattatacatagaaaatgcaaatttttctattttgtggacgattatcttgtaatataccatctaagaaatgcatacgtgtattttttggtaacaatcgcagtaacttggtggaagagattttttccagtaaaaaaaaaaatacataaaaaatctaaactgaaatatgccaattatgtagcatagacttacctgtgttgcatctttctggtaacacaagtaaatgaagtatgtattgcagcatctaatagatgcagtcgcacaggtgcataaatgtcctccaagaccccactttggtctcgctagcaaggatatgcaggttggtgagctaacagcctttacctgagagtggtggccccttgtccatcttcatccagacaccagcagagactgacataggccaaccagtctgtgaagaggaagaggatgtcagggtcttaaagccaagggctcagggagaacaggggttctggcatgagccccgtttcctctcctctcctctttccacacccaggtcagtgtctagccttcaccctcaaatcaaagcctgttgtctttgtaaaagggctcctgttcagtgatactaagccagcttccttccctggactggtggagcctccggtaaatgcaggtttaaacgtgagtgtgcagatgacatttcttggtagagagatggcccctggagaggagacttagagcccttcttgggcctgtgccttggcctgggtcagttcgtcctgggagcacttggtctggctgccctggcttaaccaggggagaatggtgggcccctgtcaaggcaactgctgagggaggctgaccccttttcactggaacaaaccaaccgcctctcctggcaccggagctcctgtgcaccagcctcccaccccctacctcacctccccctagcttttcctctccaaccactgtggttattccttttgtttcagacgatgcctatgtggacccacccaggatccctgcacttgctggtgcctctcttccctcctcctggcgaggtctcagcagggatgtctcttctcttctctggtcagctccttagcggtcccagcgtcccagagccaaggtacccctccctccctgccactctcattgatggccctttttgagcatcttggcaacactgacagctctctgcaatgttcttgctcctgagttcgcttccttgtttattacctccccttcgcagaggcacacaacgcaagtccagcggggcaggggccttgtccttttgctctttgtcccttgctgtttcccagcatcatggcagtgcctagaaggtggcggatgcggaaagatgacgcctctgcctgtggctggagttaggggctgaagacactgggaactcctgcctgtcggaggatgcacagggagcttctcaccccagggagggccacgggcatcttgtctgtgaagttggaactgagtttgtctccaggcctcagggacttctcatgcaatcttatctactgtgtgggccccaatcctcaccccaagggagcactgtgcatccttagtgctcattgctgcatctcccttcagatgctcctgggggagaggttcaggaaaaggtccagtacccatcacagcaggtatcatctgcttcttcacattgcccaccctgctccaaggcctgcgctaggtctggggcttatgaatagaaataaggctctatccctgccttccagcagcttatggtttagcgaaagagacaggcacataaacgtgtgagagattacagcgtggtcaggtagaaacaatgaggaagggctcacactcagcatggaatatcagggaagacttcctggaggaggtgacacttgacctggaattagatttcagaatgaaagctaaatagaaaatgggccaaaaccttcttggcacaacaataataatggagtgtgtctttgtgggtgccacacctgggttgcatctctcagaggctggtgaaatctgtaagcacctacactgcggtgggaaaggcttggttcttatgcaggaagtgtcacttctcagaccacagtgcttttgattcctgtggttctgcattcatcaggagcaggtgaggcaaagctctctgcttcagcccttcctgctcaaggccctgcctgagtcgctctttctctctggtacttctgcaaagttttttttgaaagctcctcttttcttcattgctctgtcctttcccagccagtactttaattcccccaaagctaaaactgactgtgtctctcccatctgcaccagcaattactctggccttgcttttatggtgctggggatggcaggatttcttcctgaaatatcgctcaccatccccaggcccatcaaattgcaggcggccatatttagaagggattcggagtgggaacaaggggtgtgcgtgagtgtggaagccaatattcccctgtctaatttatattttacatttctgtaaaatcatgcttagagtattttggtaatctctgcagagattaagtataatgctgtacatttaattgatataagtggtttcaattctccttaatatgacaaatctccagtgtgaaatattctttgttaatgatcaacataaaatagagttcatttttaatgtgagcacaagatttgaattaatttgtagctaaagcagggttattaaattttgtgtgcattctgtgcacaggcacacgttcggtcatacatgtggaccagggcatacatgcacgttatgggtaacgatgtgaggtgtgtgccccttctggtctgagctgaggctgtctatccttcctctctccctttgtcttagaagcagtacaagaaggggctgccccactggggtctctatctctgcaactccttggtctttggtacaaagggagcttcctggtgtcctgggttgtctggcctgagcctagaagcatggcaggtgtcctatcaaagctggacagagtctgcacaagccatagcaaggtcatctcctcctcccaactgtgtttctgacacagcatttactggtctgaaaattagcatattgctttacattataaaaaccatatgatggttaacatcatccaggagagttcaatgaaagttttgagttgaaaaagtttcttgcaaagtcatgtccagggagaaggccccggagcagaaccccagcagtgctgatcaaagccaagaggtttgcattccctaacctcagctgaattcagggcacatatgggcaagtgtgccttcccaagacgcctgagttagggagcatttacagaaagccagggccatgatctttggctctcagatccaaggtaagggcactctcaaaaaccacaactgcctccgtcagaggcgttcgaaccagtgcggctccatcttgaacaggggctgggtgaaatgaagctgagacctattgggctgcattcccaggaggttaggcattctatgtcacaggatgacatacgataggaggtcggcacaagatacaggtcatgaaggctttgctgataaactagcatgctgtaaagaaaccagccaaatctcactaaaactaagatggtgacgagagtgacctctggttgtcctcactgctcattatacactaattataatgcattagcatgctaagagacactcccaccagtgccatgacagtttacaaatgccatggcaacatcaggacgttaccctatatcgtctaaaaaggggaggaaccctcagttccaggaatcacccacccttttcctggaaaactcatgaataacccatgccttgtttagcaaataatcaagaaataactataagaatccttagtccagcagcctaagctgctgctctgcctatggagtagccattcttttattcctttgctttcttaataagcttactttcactttatggattcaccttgtattatttcttgcatgagatccaagagccctcccttggggtctgaattgggacccctttccagtaacacctcctctgctttgagataacagagggtaattttcctacaactgttaacagagaaaggggggaaataaaagcttcagggacaagtgccaaagtgaatttgaatatcgtataaaccgtgcctgggatgaggcagcaacttgcaggaaacatctgttccgactggaccctccgctcctccttgcagctggaacacagagctaagactccttaaacttttcctttgtgatgcaacccatggtggggagacagctttcaatatgcaagctgaccatgcagctcttcaatatttccagtttgtagccacctttttaatgatgatgggaactgaatcccaaaaacaatgagacctccccacgtgctcctagagacaaggcaggggtgcaggaggctgcacttaggcatgttaaatttctattggcttaagcagctgcagaaacaatctttaatcacgtatacaatattattggtgacaccgtgcaataaaagggctgaatgcttcatttttctagatttccttttatatttcaaaatcgcttttctttcaaattattgttatcttatacatttacttaaaaggaattacttatggcttcacttttttttttcttttgttggctgaccattccttttttaaattaccacctcacagggactgcagactttcaaacactttgcatatgaaatgaaaggcttgagtgtattatgttgcaatttttaagaatggcataattttaattagaaatgtatagatgaataaaaataatgctgctgcacgttactaattaggtattttattactctttgatttaaaaaagaagtatacctggttctaaggaggcagtgccatcagcttgtttgaagctcctggagaggaaaagggcatgaggaccggtggggtcatggtgaagggaggttgggggacctctcccgtgggaaaggttgggattgagaaggaaacatgtgcccaaaaaaagacaaatgaagagatactgctgagtgctgtgaaaatgatctctctttgaaatcagtcagcagcaaacactctaccattctgagcatctcacccctctgctaagctattatccaggtaatactatcctcactgaagcttttttccccttgaaatttatagataaataaataaggggctagctctatagcacctgctgtctgcttcaaaaggagtctgtcttttgtgtttaaagcagagacatgtatgatatgtgattgtcacctcagggcaatcatttttcccctggtttcctggttggctcaggtgagggtattctccccaagctcagctgtgagctctcagcaaggctggaaacctgtagctctgcgttaagtccctgaccctgcctgccatgctaccacgctccacctgagctgaagatagtatgattcagctgtggctttgtcagacgcatttgaaccagagcaactccatcttgtatagacactgggtaaaataaggctgagctactgggctgcattcccaggaggttagacattctaagtcacagaatgagataggaggttggcacaagatacaggtcacaaaaaccttgctgataaaacaggttgtgtaaagaagctggtcaaaacccaccaaaaccaagatggtgatgagagtgacctctggttgacctcactgctcattatatggtaattataatgcattagcatgctaagaggcactcccaccagcgccatgacagtttacaaatgccatggcaacgtcagaaagttaccctatacagtcaaaaaggggagggaccctcagttctgggaattgcccaccctttcctggaaaactcatgaataatccaccccttgtttagcatataatcaagaaggaacaataaatataagcagctgagcggcccatgctgctgctctgcctatggagtagccatgtttattcctttactttcttcataaacttgctttcactttactctatgatttgccttgaattctttcttgcacgagatccaagagccttctcttgggatttggatcaggacccctttcaggtaacagcttgatggttcagttagtgcttttggttgctgacatggtaaagctatggacctcccactggtaggaaggctcctctctgggatggtgggtgaacgtgagcagatcacggctgattctctacttcaactgcctttgcagccaggaggacccatggtgagaggccgtggctgtggtcaaggacctctgtgcccaagcaacaaggcacatttcctagactgagcaagagcagtctttgcgttggccctgccagatgtgtgtggtttgcatatggtcagggcagaccctccatcctgtaagaagcatagatttcttctaacttgcccagttctgagctatcacaatcactctcatctgtgtcgctgagctctgctcggcaagtgtggttcctcccaaagacatctcaccaggctgcaccaacgaatgctaagtccatatacttagcagcttcgggctaccaaccttgggttggtcttccctgagcccctgcatctggagccaggtgcactggaggaattatggggttaatagaggaacttccagagtgtggaacttctgcagaggggcatcttccaagaaaagcagagcggcttcccccattaggaatggtttgtggccaggaatctctgggctgtcacatccaattatgcagcctactaatcagcagagaacttgggaacatcctgactggggaagtcggcatctgttctaaatcttgccctcggagcaggagcagtgccaaataccacaaagactgcttagctgggtacaaaagatgctgtcaacaggccagaaatggaaagaagtcctgatttgatttgaatgaactattttttttaaatgggatagggaaaaaaaagtaattgaattacctccaataaaaataagctcccacattctttgagaaaaaaaaatatacacaagttgtgtctggttagaaatagagatattcactgctttggtttccagtataagtagcaaaattcatgacctcctcactcgggtaatagttttaaaaagctgtttctttgagactgcttggcaggtgatgtatatttccccaaacctaggctctaacctactttgtcaaacatgtcaatcatttcttctttcagcaatagctaaccaggggacatggcacactaagagtgacagttgcctgtgcatttctgtggtgtgaggttgctttgtgcctcagtgtggtccctagcagaggaatgaaccccttctccatcattggcctcacttttcctaactttggcttattattttggtcaatagacttttttttttttttttttgagacagagtctcactttgtcgcccaggctggagtgcagtggcatgatctcagctcactgcagcctccacctcctgggttcaagcaattctcctgtttcggcctcccgagtagctgggactacaggcatgcacccccacgcccagctaatttttgtgtttttagtaggggcagggtttcaccacattggtcaagctggtcttgacctcctgacctcaggtgatccacccgcttcggcactgggattacaggcatgagtcacgacgcccggccggtctgtggacatctaacaagaaaaacaaaaatttgttgaaagccttgacttgggttaaggctctgtgcagttgctggaagaccacattggcagagggtcatgatggagctcataggctacttgatgagataaaacattcctgtttgcaaactctcgtaacaatacaaaggacaaagggtggctgcatgggatggttcatcccaggaaagggatggaaattatgatctgcaaacgttcagagaaaggcagagttgggatggtcaggaaggtcttcagaaatgggatttgaagggtaggtagaatgtagcaagctgagaaggaagtgggcatggctatgaaggttgtgtgctgtgttcacccacaaggctccttgagaaggtattagttaaaaaatactctagttacatgatttccaacttttcagtaataatcacaataagcctgtagtaaagttctaatggcattggttcctggacctggttatatggccagcttcttggttcctattagcataaataagctgcacatatggagatgaggttgcatgacttgatgatttcagtcaataaaaaggcactggaatggactttctggtttcttgatttgtaaagaagggcgtggcatggaccaggggccatagcaatgatctccactctttatgcagggcacacacacggggtgagaagagctccagtgtcctgtcctaggcattggcaagccagaggcactggggagggctggcctgtctctggtcttccctggtttgcattgacatgttggttggctgctttcatatggggacatggagtctgatagctacattgcttctttaccccacatagggctttgggatcttttcagaagctactgcaagagactgggccatgggctgaccctccctagacttgaagacattgccctgcttttcagtctgtctctttctccctccttgctttgttgttctaagacctcttgttccaagaagttcacatcttttcacatctctgtcccaagcacccaacatacactggacagggggatttttttttaagaatttcaactcttattttagattcaggggtacaagtgtaagcttgttgacacggttatacacatgataccgaggcttggggtatgattgaaactgcgacctaggtagtgagcatgatgcccaataggtagttgtcaacccttgtcgccctccctcccccttccaatcactcccagtgtttattgttttcatctttatgtccttgtgtacccaatgtttagcgcccacttatgagtgagaacatgcagttctcataactgcatgcaggttttctgttcctgcattaattcacttaggataatggcctccagctgtgaccatgttgctgaaaacgatatgatttcattcctttttatgactgcatagtattccatggtgtgtatgcgccaccaaaagcctcatccaaaccataatgatttcaaaaagagaaagcaatgccggccccttccgataagaaggaatcagcacaagaactctggcaatgaaaaagatcagaatgttttcctacctctaaaggattgcacgagctccccagcagtggatcctacaaccagatttaaatgtctgaaaagtcaggcatagaattcagaatctggaaggcaaggaagttcagtgagattcaagagaaagttgaaattcaatccaaggaagccagaaaaaccacaaaggtcttatgtttctgagtggcagaaagagaggctgaccccaggttgcttctactttcagccctgcaactgtcccaatatagagaccactcaggagctgaaatacaaactcacatccagttaaacaattctcccatccatgtctgagtcacctccctggattttgtcctgtagttttatgtaccctgcgcttctctatgttctttatcaagcctgtcctccaggtaatcaattgatgcaatgagtgattagcaagctgctcttcacactagcatccacagacaccagtgtctcttcctggggccttctccctgaggaccaaagccaggaccttcttggaacacaccacttcccatgcagcctttcttggtgctgtctctgtgtttctcacaacccacagatcatggttttgggaaacagttattgagacatcatagattgccgtcactacttctggaaaattaggaccctactcctttgtttataaaatgaaaataaaatcctgttccatccatggccctgccactgagctacagcactctcattccctgctggtcaccatctctacctctggatcatgccatctctgtcattgtagacttcagctctttgttcagttatctccattacccagattcttcccaggactccatgtgaatttgggattctgtatgaatgctcagcgcaatgtatgatccttttatcacctcaataccctgcactacaatggccattttttccacccagcccttgactaccagtccttacagatgtaccgtccttatctctaactccagcctcttgatttcctaatgagcttgcttcattccttgggtcatcattgtggttggaccttagtgaggtttccagcccgctgagtcctgcctttctttctgtcattcttctccagagctctctcactccctcccccagctttgattctagagctcgtcatttaataatcttttttgtggtttgtctttaatgcctttggcccaggaaaggccctaataccagaagaacctcagtgttaatgtctcttgttcttataagcacagctgagtcttgctagagaaaaatcacaaaacaggacagagtggtggtcgaacaaatgttgcacagcaaaggcagcttcatttgggccccagctcttttccacagcctgttatatttgaacagtaaagtttagctactaccctatcacacaaattattcttgctgaggtgactcacagcctgttggataaatgacactaacatgtcagtccagccctttgccatctctcacagaagcccagtctgcggcagaattatctcaccaccctccagtccactatcggagtcctagagaatgttcaccagtgttttcctgtattttcaggcaaagtatttcaccttacagcaagtccagaggatggcagagattcacagtggcttctcttactgacctaacctgtcgctgagctctgtctataggaactgtgccagacagctcggttctcctgctcagtgatccctcctgctctcctgctgggtcctcgagtggacttgttctcttcttccctcttgaatttaggcatggctctttgattatgtctgacccctaggctgtggccagaacactattactcatgctggtccttgcagatccacccctcttgtgccatgacatgcactgcaacagactttgagatggagcccccatcagccagggtccctggagagtacgatgaaagagccccctgctaatgtgcataaatggggagtaagagcaagaaatatatttatcttattcttctatttcggttttttgttactgcagcataacttagcctaactcgacagatccagaagctgcaaaagttgacccttgaacggtgtcacaggtgtcaatcctatgacccattctgttgccaaagacccttagcgctccctactgcccactcctcccctggggtcccccttctcttatgtctctcttatagcctgagatgtcaatcattctctcctctgtctgccacgctgatgatggtctttgaggagggataacaaggatcagttgagagaagaaacagagcaaaattagggcttagagcccagctgtcaatcacagggatgtctggtgcaggagacagagagctgctgtgggcaccgtggcccctccagtgggggcccacaaggtgaagcaggactggagcagggagtgacgctgagaatgagtggcatcgcctctgggggagcttgcacacccctcccctcccagtgttccccctcccaccccccccgagtccttgaaaagggcttccgtggcctgtctccacccctgctcttatttgccatcctccaaagagaagctattagcctaggtaaacactccctctcccgagtgacttgatctctgtactccctgattcagttcctttgcaaggtaaataactataaatactaaaacatgtcaatagctttattaataaatgacttctggctatcttagagattctgtgctgtgggctttttcacgtattttatgtggcttaaccattgctggctgaaggatggctggaatctgtctagcacatcagaaatcacagtacttagactccccaaaatgttggccattcacggtgttaatgcttttttttcttggtataattttttttttcatttaatttggagctcacgtagcttataccccaatgtcaataccataaggcacagtgattcagtcatgcccatgcccatcttagcgttagaattttaaactttcgaaccctaacttctcatcagaatgaagcctaataaatcctcctcccaagagcattttcaaaaatcctgtgataaaatacacttatttctcatttgcagttaacttgaaataattttcatatttttttcccaaaactttatcctagtcatttttttcgggaattatcaagttttcttcaagaaaactgagaattgcaattcttaaaaccaagtcaattttctagataatgctttctgaaaatctaactcaatgtatctttttgtctttttgtctggttttgagtctcattttagaagaaggcctccaaggaacaagagtttcaaaattttccagaatgagattctctatttttcttgtggatttcccaagatccatatgcagccttggagcaaacactgtgagccccatggttttgacctgggcaggtgggtctgtcttcaatgctctgggcaagtctctggctacgcagagctccggttggaagtgcagagctctgacctgaactgcacattgtggatgttgtctgatctcagtagcaacactgacagcgttctcagacactcacatttctgtaggcaaagggaaactctttctccagtgtttcctctgaagacactaagctgcatcgatgttttctcttcttctttcccattatccagcaggttaccctcaacctcctcccaagaaaggagactgaatggagcacagagttgaccacgtcagactcacctgcgggtccttcagttactagctctgctctgtagtgactctccctagaaggctggcagggggcaggtgccatgagctgcctctgtctgggaggtaacagatctgacttatgccattaaaggacactctggtggatggacagataactgggaggcagtggcaagaggggaagcagagaagtcaatcaggaggctatggccatagcccaggtggaagatggtggtgccagacttagtgggatggtgaggaatttagagaggaggagaaggatgcattgattcaaggggaactttgatataaatggcatgaacttccttgcatagactaagtgtgggtgtgacggggaggtaggaattaggtgtgtcctgtaaacttttggcttgaccagcagggtacgtggtaatgttgagatggggaaaattgggcaagagataggtctgggtggaaataagtgttctagttggtcatgaaggatttgtgaagctgacagtgatatttgtagcagagaatccaaataggtagtcacctgcgacacctggggctcataagagagatcagatctagagatctagaggcactctcaaattgatgagattcaagtccttgaactggctgagagaatgacaagagggaatagaatgtgagtacagagttagcttgaagataatagttattcatttaaatattactgtagtcttttatttatttatttattttttagaaatggggtctcactgtattgcccaggctggtttcaaactcctgtcctggcttcaagtgatcctcctgctttgacctcccaaagcgaatagaattaccaacattttagtctttaattataggagacatggctcattttcaaaatattgatcaataaaatggagttccctttggaccaaccctaaattcctgtcctattttcatatttattcaccataaccagcattgcatatacctccttttggacctaaaatggagtacatacatttatatgaacatctagatatatttaaatagcatatttccatagagtactgtcttttattttcattaaatatgtatcttagagatcttcccatgtcaatacatatagatttaacttggtgttttagggtgtgctacttgatattttatagaaatatatatttaatagagatagggtcttactactttgaccaggctggtctcgaactcccgacctcaagcaattctcccatcttggcctctcaaagtgctaggattgcaggtgtgatccaccaccactggcctgttactccatagaattaatgtgctacagtttacctaacatttcccctactgatggacattcatattgtttctaatgttgcgctttgcattccaacatctagagtttgtgcggaggtcgtgtggagctcatgtggagatggagggccaccaaaggaccctgagatagacagtgtgactagagaggaggaggaggaaaaagaggaacatttacaattctggaagccaagagttgagagtattttggaaagaggaaggggtcgaatattttgaacacccacgaaaggttaaagaagtttaagatctagaagtatccattgaattggggaacatggaactcaatgttgacttgtcaagactggattaggaaaatgtggcacatatacaccatggaatactatgcagccataaaaaatgatgagttcatgtcctgtgtagggacatggatgaagctggaaaccatcattctcagcaaactatcgcaagaacaaaaaaccaaacactgcatgttctcactcataggtgggaattgaacaatgggaacacatgggaacacatttcctttatctttaccaaacatggacacaggaaggggaacatcacacacaggggcctgttgtggggtggggggaggggggagggatagcattaggaaatatacctaatgttaaatgacaagctaatgggtgcagcacaccaacatggtacatgtattcatatgtaactaacttgcatgttgtgcacatgtaccctaaaacttaaagtataataaaagaaaaaaaaaactaattcagtggacagtgagcatgagagccagacaagaaaggggtgcagagggaacaaagggggagacttggccaaggcagccctcttgggtgctacttagagaggtcgctgtgaacatgagctgggaaatgggagctagagctgcggaggaaatgggcttagggagattccccctttttttccttccttctttcccttcctccctccttccttctctccctccctctcttccttccctccctccttctttccctcccactccctgcctccttcctttcctccctccttttctcctctttcctctctacttccttccctctttctctccttccttctttccctcctttcttccttccctctctcactttcccctccctttcctccctctttccttccctctctcttttccttccctctttccttctctccctccctctcttcttccttccctctctccttccttcctttcttccctccttcctttcttccctccctccttccttccctctcttcctctctccttccttccctccctctctcctttcttccctttctctttttcttccctcccttctgcccttcctccttcttttcctccctccctccttccttctttcttcccttcctccctccttccttccctccttccctccctctttccttccccctccctctcttccctcttctctctctccttcctccctcccttattccttccttccctctctttctcttccttttcctccctccttccttccctccctcactcctttcttccctccctccctagtcccttgctttcctctctccctccttctttctctccctcttttgttcattccctctctccttccttccttctttcccttcctctctccctttcttccctctttccttccttccctccctccatccctcctttttattcctttctcccttcctttcctccctcccttccttttcttcctacctccctccatttcttctttcctccagttggcacatgtgtggcactgctgaagtcacacattctcagactctatttctgggtttcacattggaatgacagtaatgatgtctgtgagcacatagtaggcatggtataaataacgcttgagtaaaatcaggagcaaagtgcaccttttttgcagagttgtttcctaggaggaaaatgtgtgaagagcccttagaagaccatgggcacccaggcccactcagtccttgtcacttgtggccagtgactgtcacagaagaacaaagccttcagcaatgctccccgttcccaggcttgcctccttttggctcataaaccaaagtgaccgaggctttgggctggatgtagtgaaatgcacttggaggtgcctctggtcaaccggtcgaggagtggtggctcctccagctcctgtcccgttgtgtggtcaccgcctctccctccacctcatacaagtgtttcttcagcagctgcattagctccgtagagtcagcaacacgaatttttttttaaagtaaatttacttctgtagaaaagaaaaagaatgtggctattttggactttgatgagatgcactttgtatagctggaaatatgagtagaagttttcgtaatcaaaagcgaccaagcagaggctcctggccaggggatacgctgcaggaagtctgagcccaccttccagggaggtaacggtctctccacatccagggcagcagaggtgccgtggaaatagtgctccgtgccacttgctagatctgaccactgtgctgggctccagctgctcaaaacataaatcgtctttaaacacctggggcctgcctgcctcccgcagccatcttcgggccaatttgtcaatcctcgctcgttccatggtcctttttttgagccttgataatgcttctgaaagaagctggggacacttttgccattcatcaccaaagaacgcaacattctgtacatttattacagtatacattatgagcacactattaactaaaaaaaaaagcaaacccaaacctttcatttctctgaagttttcctttatctttaccaaacagataccgaatatgactgagaatttaataccctaaagtttaagacgggtttgtaaacatggtccctgctggctgctattgatcttttgctattttaatgcatttttactgaccgacatgtcctgtggtaaggaatattgcctaaattagttatctgattggttcttttgattaatgacgggcctgtgctccattacacatgacaacatgatcagaataatcactatcgctatccaagccaggcctggcattttttattccttcatttttaaagttcatttataaaattatttaatgtatacgtcctaagttgtaatttatttacatgacacttttttcgatgggaactgttgtactgtgtcacaaatggctaagaaaacaaggtaaactagatgtgcagatcaatgtctcttggctcaaggggaaaaaaacataatcaagattcaggagctgaccttgtaccaaagtccaacctgtcacagaacaaacactgagatacccaacaaatcaccaggcatggcaggacatgttctcctgcaatcccttctctccatcaccttctttctgcctggaacttctagcccttggacctctcaacttccttccttctgagtgtaaaataagacagtgcaaattcttcctggccctggctgcagcctgtgttcaccaagcgggcttcttgtgcatatgataatttggcaagaggccctatcagggatccagaatattcaaaatcagaatgtggaccacatctgaatgagaaaattgtgtgtgtattttaagcaatgacatgatattagttctggagaaatgaaaagatctgaatttagtctatccaatgattggataacaccactcctcagaggatctgctttaatgtaattatggtttggcttaatacaaacttggctgggtaataaaatgtaagttgtgagtaggtctggaatctttgaggcttctcaagaagatggctgtgttcaaaatttttctctcacccatgccctgctcaacttcgaaggaagatcaaggaagaaaagcttcagccctgctcctttttgagttctatcattttgtgaatttctagagtccagggtaataggctttttagggagccaacactgggcttccaagagccagctgtgcttttcctaaaaggccccacctctctgaggcaatttggcaaagcttctagccgcttctccattaaaaattattacttgagtaaaatcagacaagcctagggtcatgctagatgtattattatttcaaacaaaatttggttgcctccctatccttgtcttgctcttcctatctccccacacctgctctcacctgcagttgcctccatttcttctagaagagtccttgccatgtttctcaagctccattctgcccctaagacccaccccgccccccagcattggtctgactgcaggtaccagggaccctgggcactgcaatttcatgtcaacaaatggctcctaattcagtatctaacactgaacgagatgtatgaacggtatcagagcccaggaacatagaacctttccgttgatctcggagaatcctttgccatcctgttagcatgatgttgttagagactctagcatttcccggtggacacggtgggccctggccaggctgctgttgaacttcaacagaaagttcaacttcttgggtagaaggtcggatgggttgctggtgaccagtgaggtggtgtgccggagaccctacagagtggacagcacattttttcccacacacaatcctcaggggtgacctctgtctcttctcaggtcccagggagatggtctcacctccttctcaattcacatgagggaagctcctttcttaccaggtggagttgcagctctaagccctctgttttctatgatccttgtcaattcctggcacctttggcatgttaccatgttacaaaaaccaaacagacctaaagcaccctacgtttatgggttcagtcttttacactctacctgaacttcaaagtcaatagaagaacaacatgtgggtttccaagcgaaggcacttaaaatatagtgaagtggatttacatggtcttttttaccccctagacttaattaatgttgtaaataatacctcttatcttcttcataatgatttgctctgttatactattacaaaatttcattctgtcaattctcacagtcatttgcacagctcagacatgaaatagaactttggtgggacacctaccacaggaaacgcctgcaagtgtgtgcagagggtgcacgtgtatgtgtgcccttggacttgggaggcgttctggggtctaagataagcaagcaagtgagattatgttgaatatgcaagatatgttaatatgattaaatgactactggatcgcccaacataatcaattgaaatattcaccaactttgtgttgaaattggaagaaattattaccttgaggctgccaaacacattttgcagctttgaatttgcaataatgcgtgtctcacttaacatttaaaaacatatttttgactttaataaagtaagatgagtctattaaagagatattcaccagaatggaaggaagattcaaccagcagaggcgacaacgcagagaaagacacctgggcagtggtggggactgcttgtctcctcccttcctccctccctttctctgtccctctctctcttctttccttcttcagggacttgaggctgagttttccaaggggaagcatcctattccaagccattcttgttaatttatcattgcattatttgccttcactctcaaaatcctgcaaaatgatttagtctcttgatgtgatttacttgtgttttaaaactccatgcaacaccatcaagatcagagggatgtaaatgtgtcttctctctcactgaacaagcacagctaaaacaaatgaaatcaaagatgcatattcctttgccgtggctttgcaaaatgtaagtgatggaggaaggcagtagtcattcagctctgttctattattgacaacagcagacgtagaaattagaaaacaaatccccttttaaatgaaacgaagtaaaaggcctccctcactcagaggaaatactaattggagctaccttgctaatgctagcgagtcacaggaaggaaacattaagttattatttttaataatgcttacaagtctatccagccatttccagccagtgaaagatgtcagccttggccgaacgtggcagatctacttttcaccaaagatgctgctcgtcttccccctgatagcaatcattaattttattttttaacccagtcttcaaatgaagacagatgagctggagagttttaaatgcaggctgcttatgttcagaaaaatggctgtgagatgccagatcacggcatctaagctgaggccagttactgtttgggaagaaaagaaaaacaaatgtaagaggagtggcagagccaggcctcggaggggctgagagtgagagcagaaaagaaaagggtgcggggagcaggcctgtctcctggtctttgggtctgaccatttcataattgtgttggagagttacagatacaattatggttgattgatcttgataattttaacattacattttaatatttattttttattaacaaccttctcagtgtcagagatcaacatgcctattagatatcacatcattgatagcattgtgccatgtctttaagaaaaacgttttctttatccacgtaatttcatccaagccatatttttagtcgaatgtcaattagcctgatttgattgctatcattttatttttaagtcaaagattgtgacttgatctcactttaagctgctccagacagatttcaagtgacccttagcttagaggttgttaagagatctgcttacttgcattcagtagatcatctggttctcaaaggaaataggattaaaatgcatgtggctccatttggcaactggtttggggcaggcacaaggaagaagagaaaaaaggagaatattgttatgaaaagtgcttctagaatggtgaagtccggataactgcaaagctgtcccttcataaaagcagtgagaaaaatggcagaaagaaactgtcaaaatcaacattttcagaactctggaaattaatcagtggcctccaaccatctgaggagcatttattcaagataaatagctgagtcttggtgaggaataatgagcatgaagacatttgaatttgccgtttcctttgccctcttccccgttctgtggtggtctagggaaacatcagcctcacaacaatagtaggcatgaaaaccagcaatgtcatggccactcaaggggcagggagtatttgtagctcccctaaaaggtcccattcccaagagttcttagtatgttacccattgggcaaatccatagaaaagtcccattcactgggatggtctttggctcaaagatcccccagtgggaaaagctctatctccagggcatttgttgaagacaattagtggtctgacacagtaagaccagttggagcaaacaagaagctgttccaaaaacttcaaagaaaaatctagaaatgagatgactagaaaaggctttgaaaagatccagcaccttcctggggatctagaagacctgtcagagcttttgaatgcctcttgtatttagcatagtactgtgggttcttaccagggaaattaggtaagaaacaatacagaaaagacatccagattggaaagaagtaaagctgtttctatttacagatgacaagatcttgtatatagaaaaatccttaaatttttattctactaaaaaattgttagaactaatgaataagttcagtgaggctgtagaattcaaggtcaatatacaaaatctattgtatttttatgcaccattattgaacaatcaaaaaataaaataaaaaataaattgtatttacagtagaaacaaaaagaattaaaacatacttaggaataaaatgtaacaaataattgagacacttgtatactgcaaactataaaaccttgctgaaagaaattaaagacgagttaataaatggaaagacatcccatggtagtggataggaatgcattgaattaggcaatggttttaaaattgatctacagatttaatgccacatctaccaaaatcccagctgcctttttgcagaaactgacaagctgatcttgagacttacatgaaaatgctggagacctagaatagccaaaacattcttgaaaaagaagaaccaagttgaaggcttcatatttcccagtttcacaacataatacagagctacattaatcaatgcagtgtggtggtgacataaggacagacacataggtaagtgtaatagaattgaatgtcaagatataaatctttatatttactattcttggtcaatacatttttggcaatggtcccaaaacattcaatgaggaaagagtagtcttttcaagaaatggcactggggtaactaccatttgaggcatttgaacttgtcccatttctgtccccctgccccagttctgtagtagtctaggaaaacatcaacctcctaaccataataggtgtgaaaaccaacagtgtcacagccactcaaggagcaatgaggaaccacatgcagaaaaacgaagttggactcctacctcaaaccatatacaacacatagtcagaagtattcagaaatgtaagagttaaaattataaaactgttagaagaaaatataacagtaaatcatcatgactctagattaggcaatgatttcttgattatgaaaccaaaagcacaagcagcagaggaaaaaaatagataaattgaacttcatcttacttaaaaattttaaacaacactatcaagaaactgaaaatacagcccacagaatgggaaaacaaagcatttgcaaatcatgtaccttgtaagggtcttgtatccagactaggtaagtagccttaaacttaatgataaaaagatatccagtctattattgatttataatcctttgggtatatacccagaacttaagtataataaaaaaagataaataactcaattaaaaatgaccaaagtatttaaatagacattcctccaaaaaagatatacaaatgactaataagcatatgagaagctgctcaatatcatcagtcattaggaaaatgtaagtcaaaaccacagcaaggtaccacttcatgctcactaggatggctaaatttagagacagaaaataacaagtacttgcaaagctgcagagaaattaaaatcattatacattgctgatggtattataaatcgtttaacagttcttcaaaattgtaaatggaagttaccatatgactcaacatttctactccttggtatttatcaaagagaaatgaaaacagatttccacagaaaaacttatatgctaatactcatagtggtagccaaaatgtgaaaacaaccaaaatattcattaattaattaatggataaataaaatatatctacataatagaatgacaagaaaaaggaatgaaatactgatatatactatgattgggtgaaaatattttgctaaatcaaagcagccagtaacaaaagatcagttatagtataattttatttatatacaatgtccagaataggaaaatccatagagaaagattagcatttgccagaggttgaggtaggggtgtagggactactaatggctatagaatttcttttagggatgatgaaaaggttctaaaatgagatagtggtggtggttacatgactgtgagtatactaaaatccacttaattgtacactttaaaaaggtgaattttatgatatgtgaactatatctgtacaataaagctgttattaaatacctatgatgataaaagagaaaagaccatttcccaatttttttaatataattatcaactttggacagagtaaaacacctagaaaggatatgtttagtgtatccatgagggtcaagaaacccaacatttgatgctgttatcactgttcttgttatggtgtggggcatagttcactttcacagtgagtggggcagctcactaaagccggggctcccttgctcttctttgtctcctcccatgacaccctactccaggcacctgccataaagccttgaaaatataaggaccttaataagtaataggtgagtaaattggctaaccggtgaatgaatgcaaatcattaaagaggaatgtgaagtagtggtgttgatgatgatgatgatgatgataatggcgatgatgataataatgatgatggtgatgatgttgctgatcaaggtgatggtaagatgatgatgatgatggttatgatgatggtgatggtgatagtgataattaccatctttgtccctattaacaaatggtggtgatgataataatgatggtgatgatgatggtggtgatgatggtgatggtgatgatggtaatgatggtggtgatggtgatgatgatgatagtggtgatgaggatgacaatactgatgatgatgacagtgataagtagtagtagtatttctgtagaggctatcaagattagctttgaaagaactcttcagagataaattctaaaagccatttatgcaatggataaattgccaaaatcagtgttaaccttccaaagggttctactgtaaagctcagctctcgtacaaaagtctatggcttttaaaaatatttattaatacttttccagctgatatgtaaggcttagcaaagaggctgggcacggtggctcacacctgtaatcccagcactttgggaggccgaagacagtggatctcttgaggtcagaagttcgagaccagcctggtcaacgtggtgaaacctgtgtctactaaatatacaaaaattagccaggcatggtggtgggtgcctataatcctggctcctcgggaggctgaagcaggagaattgcttaaactcgggaggcagaggttgcagtgagccgagatcatgccactgcactccagcctgggtaacaagaacaaaacttcgtctcaaaataaataaataaataaataaataaataaataaataaataaataaaatttaaaaaagagttagcaaataaggtgaacacaaaaaagcgattttaaaaccatttttcaaattttactactctttgatatttatttgtgtcctttccttcccttaacattagtttttatattttagaggaaagaactcaggtgaagaccatagctggtcctcctgtgtcactgggttatgtctgtccttgactaccagcaaggcctcctgctattggttagatttctgatgtaccatactcttttgtcctgtcctctagtattttgggtcaagtgaagggaaagtcactgagtctgcttgttcccaaatgtctcacctcaaatcttctcctcattttctctctccacctgctttctcttcccccattgtctttttctgtaagtgagaagggtagaggggacacggagccagcccccttttcaaactcagaaaacaaggcttaccaacacacatagagaatattttttaaataaaagccagcatcaggatgggtggctgagaaagaggggtctacattagggagaagataatctttgtccctattaacattgtcagtggcagtaatttaataggattctgtgctatgtctgtaggaaattcctgatatttttcaggtatagaaatgattgcaatgacactaaatgttctttagtgtcactaaagttttgcctaccttcagtactacatcattagaagattcacctccttttcatctccgttgagtagacaagtgaccaaaatcccagcatagctatgactgtttcaatcattgaagaaaatttgctggccacgggacaaaattgcagtagaagtgactttatgtggtgatccaaaaatgagataactgtattcttctcattcctagcggaagtcaactctgcaggaagagacactgcttttgggaggcaaagttggcagttggttttctgatcttggtttgccattgaatcacctattccttgaggacaaaaaaagacttgtgtccaatgactggtcaagattcatcattccactggtccattttaaaggcttatctctcatgctatctatataactgactccaggaccatctccaccttttggaatatcctctgattacttcatttctttgtttgatttgcatttagtttttgtaagaagagcacttgatggggttattttcctcctgagcatctcacagtggtgttgctttcccagctctgtccatcattggtttgtgctcatggctctgtaatgtccctttgtcttttgcactttgcagagaagggtatggctggctctacctatgagtgcaccagggtagtaaggcaagcagaacaagaagctatttgcatctgttttctcatgaggtagctcagtccccatagttactattcctctttcctggccatttgctaccctaaggccagcaaatcttttaaacatgaaaatcttatcatgtcattctcctgatttaattcattaatggcttttcatttcctttaggacaaaactaaaaatccttagcctggacaattaggttcttcatgatcctggcctaggctagctctccagctccatctcaagtcatcactctccattgtctaggaatgctggcttccttcttctccaaagggagggagctcccttccatctctgagtgtctgagccttggcagtcgccattgcctcttccgctagcactctgtcctccaactcctcgcttggctcactgtccaggtctcagttaactgccactgcctcaggaaaattttctgtggcctcccacactgggtgccacagtaacacattgatcataaacctctgctttttcttcaaagtccttgtcaaaggtctagttaaatattaaataaatactaataaaaatatgttttcttaacataaatgtgaattccatgatgccagactatgtctcattcctaacagcatctctagcgctgggtacagtggtgttcaacaagcattttttgagtgaatgactgaataaatgtttttttctttgtccttctccataagctctaagaatcatttgtgctgggattgtgtcttaatattctcatctctatgcatggcatttttcccagagctgttggctgacgactggtcaaatccaagaccttgatctcattagcactatcctcccaccagctcccagtcgtcctagaagtgcttagaggtggaggcacagccagtgccaattccaagatttctcaaagaagtcttaggagggtaatactttcctcactgtatatttgctatatagagctagcgctacccagtgggacagtggcaaacccttttggttgcctaaccaacagctcttccccacttctttcctgttggcagggactatgtttatttgggtacccaggtctccagcatgatttttaattgggtgaaattatcccagctgcagaggaaaaccccaggtgatatgaataaatagttctcaaaatgtaatctgtagaataccagggatctcagggccctttcggggagcccttgatgtcaaaactattttcatgataatactaagaaatcatttgctttttttcatgttgacatttgctctgaaggtaaaaaagcaatggcgagtaaaatttctggtgccttggcaccgatcaaggcaggggcaccaaactatactaacagacatttcattcttaactgccatactcacagttaaaaagtttcagttttatttgagaatatctttgatgaaatagcaaaaactataattattattaaatcttgcctcttgagtacacgtcatttaattattctaagtgaagaatgagaagtacaaaaaaaatcatttctgctgcataccaaagtacaatgcatattgacatctcaaggaaaagcccttgggcaatggtttatgttgtaaactgaactagctggcttttatcacggaacactattttactttatagaatgtctgaccaattatggctattcagattatggtatttggcattttttttttcaaaaatgaagaaaggaaaatggttagtagtatttcttgccagtgatagaatttaagttttaaagcaaaattataatttttagaaaaaattgtatttgccactctgagctcaatagctctgcaacatcttaagaacttctgatgagatgggtgaatatattaacaaatatgatttttcaatattgtgtaacaagaaatgtcaataatgaaatatctgcataattcattgaaccaccgtattgccaaacaatcaatgcacggtgttacaaaaacatacctgggtaaaaattattttaaagagcaaggtcgatcaatagatatcaatgtaacagaatataaaagttctttgatatggcctcagattctacactgtatctaatctttgaaaagctaccccttgtaaagttttagtgtagtatcaaagaagaatgttcacaattgtccaaaagtattattaaaatattcctcctttttgcaactacatagctgtgtgaggccatattttttcatgtactttaaccatgcaacatattatagcatattggatgcaaaagaagttatgagaaatcagctgtctctattcaaccagacattaaagagagttacacaagtaaaaaagaatactagtcatctcatcatttttttcatgttggaacacatagttatttttaataactgcatgctctttgtattaatatatgataagtttattttttacaaataatttttttttaatttttttggttttaatttctaatggggtaaattggctgggtgtggttgttcatacctgtaatcctagcaatttgggaggccaaggcaggcagatcacctgaggtcaggagtttgtgaccagtctggccaacatggtgaaaccccatctgtactaaaaatacaaaaattagctgggcaaggtggcgtgtgcctgtaatcccagctactagggaggctgaagcaggagaatcactttaaccctgggaggtggaggttgcagtgagccgagatcatgccactgcactccagcctgggtgacagaaagagactccacctcaaaaaaaaaaaattctaatggggtaaacatatgtataaataatatataatacaaatatttattatataatatatataaatatataacaaatatatgtacttttattataggtttattatagatttagggagtacaagtgcagtttcgttacatgtgaatattgcgtagtggcgaagtctgggcttttagtgcagccatcactagtgtagccatcacccaaatagtatacatggtacccattaagtaatttctcattcctcacccctcttccaccctcctaccttctgagtatccaatgtctaccatttaatggagtaaatactgatagacataatttacataaacaaaagcttgataatatctggtcagggccaatcattgtggttctatttattaacggtgattgctttgggcataggcctgaaatgagacgtagtaaggagttctgctaggcggaaagtttacttttatagtgacacacgagaaagagatggtctcttttcgtccactagccatcactgggttggcatgtgacagctagaattgtggcagtcttcttatatgaccacaagctgacacaaagaaggtagtgaagtgaaagaatgaaagtaacgtgggacttggtcaacattgctgcactgcaggattaaccagccctggagccatcttgtccctagaagttttgttacttgtgataacagggttcccctattgcttaagctgttcgcgtacagtttcccttaatagccaagagcattctgatataggaatttgttcctaaactttaaacttataaagtaactcacaactagaataaagagtctttttttttcctttgacttttttcagtatggagctcacattcatatcagcctccaagatcattagtgctctatgcccaatctcttggttttatatattgcagttcatatgtgggtatatgggttttcctcctcctagcccttcccaccatccaaaccagcagaaaaataaatagccatataaaagaggtgaatgttatagacaacaaaaaactgccgggatctatgctgcacttcccccaaagagtcatttcagtctattaggcacataacgcatgttttaaaaaagaaccagttgtaaatacatatttgttcagatggactgcagcacaacagagagtctcccggggagagaggatgtattttacaacctgccaaaaaagatcctgcgaaaagtaaaataaggacaaacggaaaggtggagaacccctctgcccccagaaggctgatggaagcacagtccctccgcagtgttgttatggttggcctgacattctgatgcccggatctcagaggcagatctaagagccacttgtctccttgatgcctgagaaccattcagcccaaatgtgggattccaggaaggatgatggagtgagtattcaagtgaaagcagctccaggcaatgttcttgagccccaggagggggctaattcctctggtgaagctggaatgggctttttttggctgtgggggcatgaacagacgtgaagaacctcaactcatctggggttggttccagttgcctccatcaaacttaaagtagctcaggacctactttttgtgtgtgagtgaggtgtccttatgccagactactgtctattaccactgctttaaataatagctatagccaggacccctagcgccttacactggaacatgcctaggaagtggcattagctcaataattagtcccattcaggagagaaccttgtggcagaagcagtgtctagtgctgaatgtgagcccctcgaagtggggggaccttctcctatctttactttgtggatatactatgccccttcccttctgcattttgccaggattcatgagctttggggtataattggaatctccctaagagtaataacttagttaaagatgtacatttcctatggagtcaggaggaatgtgactgcagttggtcccattaagtgatgatgctaaggttgttcacctggtgaaagtggtgactgccaagtctctcccttgaggaggttccttctgctttttgtgatcagtgaatagtctgtgggttgatacttggacaccatgtaaatatcctgttccccaacgatcttttgactaatggtttttggaccttccgtaactgagtcaattattacatttttggttgcaatatggtgatttttctaattcagtcattacttctacagttattagcttatgttgataaggaactaagaatctatctccataaatttgtggattatttttctgtcagtatgctataatccattagcatcactattctttctgacattaagattgccttcagtttgaccagggagatctccttcagctttgagcacctccttattttctgttccaagatcagcttgtctattcctgcctcggactggaaatgagtcattgctccaaggatccttgtttccttccagtggggagtggcatttagaaaccacaatctgggtactggaagggctcattggtactggagggtcattgttcctaggacatttcggtcaaaagaactagaaaatgtaatgtttcttttttaaattaattaattaatttatttttttttgagatgaaatcttgctctgtcacccaggctggagtgcagtggtgctatcttggctcactgcaacctctacctcccgggttcaagtgattctcctgcctcagcctcctgagtagccagcattacaggtgcatgccaccacacctggctaatttttgtatttttagtagagatggggtttcaccatgttggccaggctggtgtcaaactcctgacctcaagtgatcagcctgcctcagcctcccaaagtgctaggattacaggtgccagccactgtgcctggccccattttatttctttctttagcaaaatcgggaattcataataagccctccagattacttctaataacataggcgttttccacacttcctctagtctatatttgtatctcctttctctcttaaggaaagttctagtttccaataacactaatatatttacttatttgctctgtgctacagtacatatacaataatttcagatttactaatcgttgatgccacaatcaacacaatcttgcaaactaaagtttaagacagctttgccttgtggtcagtagttgtcttaccaatatgttgaacgtaactccatccatgagtaaatatcaaaaaagtctagatttgataacgttgcaggggacaactggcttggattcttcaacagaatcaatattatggatgtaagaagaagaaaaaaggtaagggaaatggtataagtaacagaagacaaaagagacatggtgaccaattgcaatgtcaaatccttggttggatcatggggaaaaaaattccccaaaggacaaacagctcaatataatcatggattgtatattacataatattaatgttttgatactaaatgtgttgggtgtggtaatgggactgtgctataagttgcatttatggatgagggctgcatttggtgacaattctgagtcaacaataatgcttattgttttccttatcttccttttaaagacacaactcatgagaaattaaaacaaatacataacttcaagtttattgatagctgataggtacatacttttgatgttttatcttaaactacgtttaatctacttcttaacccattcactaattttattgactacattttatttctagagctttatcaatttgattctttttaaaacatctttatgttctattttcaaagtatcttgccttgcctccaccccaggagtttaattctttttaaagaatgtcttaagtgttgaagatcacttaaacaaatctactttatctattactctttaaattgacattccattatctcaactttgaggctctagtccacctattcattgtttccaaggatactcctttctaatctgtgctttctggtctgcttggtaatttttgattgagagttcattgccattgtcagtgtgtttttctttttttctcatgagaagcccaggtggacagtgttatgaagttattctcacagaggttttatgtccttggcttcttccattgtctagggccatcactagctcaaggcaaatcttatattaattttggagggcttagagttttctggatcctccagagattgaaaatttaaactccaaacagtcttaggctagggttttgaattctcaagcaagcatttagacccaaaccaatgagtaagctcctgtctcctttccccatgatggtccatagtttttgttttttttttttcacagagccttccttttaactgagagtgtagctttttaaggatcccgtcttcaagtagggattatggtccatctcctctccataccagcctaaggcctcatctttagtctctacatagcctttaaaactccagccctggggattgccccaaggaatactattatgggttgaattatgtccccttaaaattaaatatgtttcagtcctaaccccagtacctcaacaacataagatcaaaatgtgaccttatatggaaacagggtcttgccaaaggaaatcaagttgaaataagatcattagggtgggccttaatccaatatgactgatgtccttatagaaagaaaaaatttgggcacagagatagacatgcacagagggaggagaacttgaaaacacacagggagagtgtcatatgaagacagaggatggagtgatgtgtttacaagccgaagaatgccgaggctaggagaagctaggagacagttgaggcacggttctttccttgcaccttcagagggagcctggccctgcggactccttgtttcccacctcctgtcctctggacctgtgaggtgatacatttttgttgttttaagccccctggcatgtagtactttgctactgcagccctaagagatgaatacagaaaacaccctccccagttcctgcccctcactctgaaggcagccctgacatcagcacctcacaactcttacgtttagtttcctcttcacttccaacccacgaagattccttttttccaaccacagctttgcattgtcaatatttttggatagttgcatgctatgcagtgtttctctgcacttgtagtgggagaggtttcatgttatcttagccccccctcagctcacattatgaccttttgggcattaagaacccaagaaaaaatgagccaggcatttctagaataaaaaggcaatttcttcaagcacgccgccctctagggccatgctgagcctcgccaagggcagggcctggggcatgttgtgttgtgttggaagtgccatgaacacgaggctgacagaggccaggcaagtgacagaaatatgcaaagctggccaggtatataacaggccaactcttttgaacccctcaggcttcatgacatagcttttatttttctactttacctttctatttttaaataaatttattttatttattgttaagaggcagccttactctgtcatacaggctggagtgcagtggcatgaccatgcctcactgcagcctcgaactcttgggttcaagggatcctcccatctcagcctcccgagcagctgggactaaaggcatgcactaccatgcctggttaatttttcacattattattattttattagagagatagggtcttgttctgttgcccaggcttgtctggaactccaagactgatctatctgccttcacctccttatgtgctgggatgacaggcatgaaccaccacactcagcctgtttttctactttgatattctactgaatatcactttgtttaaaattctcatctaaggagaaccatcatgcaaacttaatgctaaatggcaactgcctccaagatctagagatactggtgaactcattgtgtctacctaaagggcagctgccactcagtacctgcagccattttgtgaaatattgtcagatctctatatctttcaaaataaaacaggaattcagatctttatgtgaaatctcctgatttgaaaatgttggcactaagaaaggattcaaaagttttaaaaaatgctttcaggcccaacaacatatattcacctactactgacttcaccagtttgctaaacacaatttgatgattgactctccaaaattactagctttataattttactgaaaagaaaactattctatgaagccatggtagaattttgcagttctctctaaacccctttgaaacaatttacacatttttctgtggcaaaaaaaaaacaaaacaaattttcaatggttgcacttttcttggttatttatttcttataatacagagaagtctttgattctaaaggcatgtgtttctttaaggaaaatgataaagaataaaattaattggaaacagccgttgcttgaccctcaagttctgaaaacagacggaacactcaaggtcaacattgaaactctgagtttaatttattctgttgtttttcttccttctccttccccagaacattccatattttgttagcttctgtcagagaaatatagcttcatttttatccacctctttgggcacaggtattagccaattgtgatgctgaagagaggtgtgattgccaagtccctgccgttggcacagtgaaggtggtgccttcataataccctcctttgcagtgaaagtctttttccttcagtattgagcagttgggtctctcagaacccaactgaggttgcccacagcctccatggatgatatgtaaaatctgctactttgtgaaacacctgtgtggatgctcagtgttggttacaggtatgtctttaaatacatgccttcttttctatgcccactgaccttctatgtagatatcctcaggacctgtgggcccctctctgactgtcaatctgtctactgtctcacaccatcattctcatgatgcagctggagtcattgatcatgaccttgtcaatcaatcaagtcaatcacaaccttgattaaaacctttgatgggctgggtgtggtggctcactcctgtaatcccagcactttgggaggccgaggttgagagttagagaccagcctgaccaacatggagaaaccccatctctactaaaaatacaaaattagccgggtgtggtggcacatgcctgtaaccccagctactcgggaggttgaggcaggaggatctcttgaacccgggaggctgaggttgcggtgagctgagattgtgccattgcactccagcctggggaacaagagcgaaactccgtctcaaaaacaaacaaataaacaacctttgatgactccattacataaataacaaagaccaaaacccacagcagagcactgaaaggcctttataatatgtcccttacctaattcaccaagctttcctcctggcatgatgcctccattcgtactgcattgagctcttttctgtctcccctgtcaaagtggcgtgttgaactgcatgcctgagttttgaagaagtacctttatgcacccaacagcatagctccacacatacaaagcaaaaagtaatagaaatagagggtgaaagtaataaatcctcaattatatttggagatatttccctgaactttctcggaactccataaactaaaaatacacagattaaaagaaaaatgagtagtgttatttaaaaaataaataatacaaaataaacttgactatatgttgagtgtatatgcacacacttactgaacaatagaaaacactattttctttttttttaagcttttattttaagctcgggggcacatgtgcagatttgttacataggtaaacttgtgtcatgggagtttgttgtacagattatttaatcacccaagtgttaagcctcgtacccattggttattcttcctgatcctctccctcctcccaccctccaccctccaatagggctaagtgtgtgctgttcctctctgtgggtccatatgttcttatcatttagctcccacttgtaagtgagaacatgcagtatttgattttctgttcctgcattagtttgccaaggataatggcctctagctccatcatgtttctgcagaggacatgatctcattcttttttatggctacatagtattccatgctgtataaggaccacattttctttatccagtctaccattgatggacattaaggttgatccgaagtctctgctattttgaacagtgctgcagtgaacatatgtgtgcatgtgtctttataatagaatgatttttattcttttggatatatacctagtaatgggattgctgggtcaaatgatatttctgtctttaggactttgaggaattgccacactctcttccacaatggttacactaatttacactcccagcagcagtgtataagcattcctttttcttcacaaactggccatcatctgttattttcaaacatgtgaaatacatacagaaatgatcatgcatttagccccaaaggaaatgtttataaattcttcaaatcagaaatcatgaagacagatcatgttaaaaatccagacttctaaaacaatccttgagttaaaagagatcaaaataaaataaattcacaacaaaaatgagagtcacccaaatattttaaaaaataaagctaatggtaacaataaaaaacttaagtaaatatactggaaaagagaaatgggtgcaattaaattaacatgcaactcaagaagacagaaaaggaacaatattataaacccaaagaaagtaggacatggttaatgataataacaaatctgaaattaatgcagtaaaacaatagctttaatacctgattctttgaaaagacaaaaatatcagatctatatggtcaagaagaaatagtatatacataagataaatgatattcaaaatgaggaggataatataacttcagataatgaggagattataaaattaagtgggcattattacattctaaaatatagtcacaatcaaagtatttctaataaatacaaattaccaagattgaatcaaatggatgaccagaaaagcccaaaatttctgaaagaaatttgtaaaaatagtgaaaataatttcttaaaaattgcatcagacctagagtatttgcagataaactgtaccaaaccttaaaaacaaacaaacaaacaaacaaacaaacaaacaaacagaaaatcctatattccagggcctggaaaaccatggaaaccttcccaacttattttacaatggtgatatttcccttccctatttctcttctacaagagtagaataaatttttaaattatatgtatgagcatagatacagaaactcaaaataaaacatattcattttgctttttacttagttgagtttattttaagaataaaaggatagttaacctgatgaaatatactagtatcagtaacaaaattcacaatttaaaatagaaatcctggtcaggagaggtggctcacacctctaatcccagcattttgggagaccaaggtgggtggatcacctgaggtcaggagttcacgacaagactggccaacatggtgaaaccccgtctctactaaaaatacaaaaatttgccaggtgaagtggtgcatgcctgtaatcccagctactcgggaggctgagcaggagaatctcttgaatccaggaggcagaggtttcagcaagccaagatcgcaccaccacactccatcctgggaagagagcaaggctttgtttcaaataaaaaagaaaagaaaagaaatcctatgtaaagatgcactaaataaaattaatctctcatttgtgaaagtcacagtaagctaagaaaagaagaaaacttaacccaataaaaagtttgagaaatccaaattcatgctgcaaaatttaaaaaaaaaatgttttatttgaagtctagaaactaaacaagatgcttattgaaatcccagccactgaatatggaaatagaattatataagtggataaataaaactaccaccatttttagctgatatgttttcataactatcaaatctaagtaaattccttggaaatatatttgaaggcaattggatacaagataaacatacaaaaatagtttttctaaacaacaacaaaaacaacaattagaaaatacattatgaacatatcccatttaatagcaacaaaaaacatacagcatctagaaatatagctaacagaaaacatgcaagacttgtaacaataaaactataaaagtttataaaggacttaaaggagactagttaactgaatagtagttagagatgagaaggctcaataagcaaagatgtcagacctttcaaaattaatttttcattcagttagctgatgctcttctctcttgggctggagactgctttcccaggaagcaaaatctgcaaccaagacttgcctgcaggtaggttatttttaggaaatgttccaacagtgcctggagtaaaagggatggaaggctaaggaataagagtgtctggtataattgccaaccgcatctcagtaagaggtttttaaaagaaacacaagaagctgattctagaatcatttcaaagaaagattggagaagaatcatgaagatttttcaaaaaggagacaagtgtccaggcgcagtggctcactcctgtaatcccagcactttggaaggctgaggcgggcggatcacgaggtcaggagattaagaccatcctggctaacacggtgaaaccctgtctctaccaaaaatacaaaaaaataaaaaaaaattagccgggcgtggtggcgggtgcctgtagtcccagctactcgggaggctgaggcaggagaatggtgggtgaacccaggaggcggagcttgcagtgagccgagatcgcaccactgcactccagcctgggtgacagagcgagactccatctcaaaaaaaaaaaaaaaaaaggagacaagtaagttaggaggactaatttccccatcaaaattccacacttaatctaagggtataaacattaaaaccatgagtattaaggaagaaaaaaaaatcaatggaacagactaaagagggaagaaatagaattatgtaattgaaagtttagtttataacaaaggtggcaaagaatgagccagttaactaatgatgaggacgactcattgttcatttggaaaattagacctccatttcataatatgcaaagtttcaccttgcattaaaaagttcataaaagttatcaaaacaatcttttgatgtaaaacatattctgcaataagatatgaatcccagagtatctgaaggaataaactgacatatttgactacattaaaacaaacaaaaatctgaacgaaaaccaaatgatggattgggagaaatatgtataacataaataataaaacattaattactattcataatttctaaaacactcctaaaactcagtaagaaaattaaataattccatggaaagatagacaacgaaaatgattaggccattcagggaacagaaaatacaaatagccaacacctacattttaaacattgaatctttcagaatatcagagaaatccaaatttaaacaagattgcccctttgtatacattagaacagtaaaattttaaaagtctggtaagtcctgagcaggctggaatacaagagaatataccatgttatctaccactcaggaaatgtcaattagcccttttagcagaaagagcctgcatttaaaatgtacacagctttcaagaaagcagttttaattttagaagtctaatctacagaaacactttcaggattgttcaaagatttatacacaagactgcacaccaaagccttatttgtaataatgaaaaatattacgagcaccttaaatatttcataagttatggtatgtccatgctatggaatactaagcagctgttaaagagaataacgggtattgttttgaaagatctttgaaatacattaagtaaaaaaaattcagggtatatgataatatgtataataatgtattctcatttatgtggaaatccaattatatagttatatacacatatttatagaaatgagtagaaaaaatgactgcaaaggtgcgcatctgattgttttacagtgcttacatctgaaagaggggcatggaggtagggttaaaaatatatttgggggttttcacatttattctgtgtatttcagtgatgtttaaattttttaccattttatgatgatgtattactgaggttaaattttttaaaaaagatatgcaatgttattactaaatattagttattcctatctttattaaatcaatgctgaacaaatatttcaacacatcagtttgaagcggcccatgatcagtgacttgtggagggcacctgcaggtctccatctgctcacactggggtgcctccaggtgggataggctaaaggtatgtggccaggccaatgggccggagccctgtggagacatataagaccctgataggcacgtagtaacacaagctcgcaggacatacatagcaccccatgtaggggaatacaggcaagcaccatagtgaaaaacagctttttgctggctcaggacaagcgaagcttccaggggtctcatgtgaaggaagtgccccggctcaccaccaagccccttggggtggctgtgcccgacctccctgtaaacacagtatgggtgagaccttcagtgctcctgacagcatgaccccaggggctagctgggagctgcatggcaggagtagagggaccaaagacagcactcggaccagcatcctggacgaacctcctgcttcatgtggatccagagccttgaaccctgtaccatccacagggcctccagcatgcaggctgacaatggctgggtgcctgtgggcattttgggaatccctgtgtcattaaaggagctgggagacaactgctctacagagcattgagaagcatatttcattttccaaatgctttaaacatcacccctccgttttgcaggcacgccgaaccaccgtgtccctgtgtgggtccttgagtgctggatagtgtcagggacctcggatgtcttgccctctcattttctttggcaacttggcaacccaaacagtcacatctactgatgagctcatccaatagaatgaataaacccttatttctgaccttagcacatatctgaatcgtcctccaattttaccctccccataatgggcctttctatttgttttctcagtgtgaaaagagatataacttgctacaaagaagcttcctgcaaaagctcactagtaaggcatgtatgcatctctagagtctccagatggtcctggatgtgtgaattctgcccattgctggccgtgaacattcaagggtacggcatgatgtcacagctgagtcacaggccgaggagttcttgagaccagagctgcattccaccctgccacttgcagactctgtagcttatgcaaattacttagcgtttctgaaaatggggatactaatttcgactctgcgtggttggtgttcagatgacagacaatgtgcaggaggtgccagcattacctggccctttaagacgctatagattacgtctattatactattatccccaggactgccacttgcaccactgggcctctttccatagggcaggtcaaggccctggtgaggaagaccagagcaatctaagaaagcatgaatttttcctctgagagacatagaaatgaacttctaaaagtggaaaaaatgtttcggtccacggcactatcccaggctctttggaactccaacagaccagctcacaaacaaaaaaaaaccctaatatgaaccaggtactgtagctcgtacctacaatcccagcactttgagaggccaaggcgggaggattgctggagctcaggagtttgagaccagcctgggcaacacagtgagaccctatctctacaaaaattgcaaaaattagccaagcgtggcggtgcatgtctgtggtcccagctactccggaggctgaggtgggaggatcgcttgggcctgggagacagaggttgcagtgagtcgtgattgtgccactgtactccagcctgggtgacagagtgagactctgtttcaaaacaacagcaacaacagcaaaaccctcattcattagaactgttttctcatattagtattattcatgtaatgttcttttgaaaataaacatttttttaggccgggcaaggtggctcatgcctgtaatcccaacactttgggaggctgaggcagggggattacctgaggtcaggtgttggagaccagtctggccaacatggtgaaactctgtctctactaaaaatccaaaaaattggctgggtgtggtggtgggtgcctgtaatcccagcttctcgggaggctaaggtaggagaatcacttgaacctgggaggcagaggttgcagtgaggcaagatcatgccccattgcactcctaaaatgtgttttcttttgggagaggaggagagagtataatgttgccttgaggataaggcaattctctcactattgcgtttctctgaccctatacggagaggcaatgaggacatgcagttcagtggtgaggagtgtatctcagggcaagcctcttgtgtggggggttgggaagttatgaggctttcctaagtcttatggaagaaattgtgatcgttgtttcatttctttgattttacagaattgttaccattttttcccctacggtatcttttgagggtgggagcagattcaatgaactcgacttacatcacgtttctgtttagtgatccgaatatgaagcaatcattcttctctgattatctgagtctttccaacccttaacaattctatggcccctctctgatgtctcctcccacaactattaaatattcctccttcctctgacttagagaagatttcctgtatttaaggtccatttggtaggtgtggtcctagtaaggagcgttttgagtacagaaaatgcaacactccccaagcttgcttaagcaagacaggggttacctgggggtctatagagttattttccaggggacatgggtaggaaatgcccccgggaagcagggggcctggaaacaggaattgagatgttccagtcaggaaatacagccacctgtgctgaggccagctggtcttgttttctgacctctcgctacacatctgtattccttgtctccgtctgtttctgtctctgtctcttcctccttctctctctctctctcttttttgggtggggggatggggggatggaattttgctgtcttccaggctggaatgcaatggtgcaatctcagctcgctgcaacctctatctccctggttcaagtgattctcctgcctcagcctccggagtagctgggattacgggcatctgccaccacacccagctactttttatatttttaatagagacaagtttcaccatgttggccaggctcctctcaaactcctgacctcgggtgatctggctgcttcggcctcccaaagtgctgggattacaggcataagccaccatgcctggccatccctcttatcttaccctcttctgccttcccaagacccagtccagcctagaccctacttacctttacaactaataggcacagagacttgactgggccattctgtgctttacttccaaatccccaagaaaaggaatctaaatcatctaacctgtcctttgggttgatccttactgagccagggaagctgcctaatctatctgtctaatcaacagccacaaggagggaaggtgcagttctttttctctgactaataaaagttccttgagggccggaaccagtattcccacgtggcctaacacccagtaggtactctgtaaaattgattgattggttgattgattatataccatacaacaggcttgaaaactcctacagtgtgagcatagctttcaaattgtcacttgtcccttctaataatgaatgtcagatgatccaagctgaacagagtgttggattcgtttattttactttctgtagaccttctgggtgaagggcaggctcataaaacatgtgtataagatggaaaacttggggtacttgcagcgatgaaatgtaaagcataatttaacattacatatagcattgaggctcttggtaggatgtgatgggtgcccagctgctgtatgttttgatgtcgttggaattgcgggtcctgtaaggcagcagtccccagcatttttggcaccaggtaccggtttggtggaagataatttctccactgactgggtagggggtggatggcttcaggatgattcaagtgcattacatttattgtgcactttatttctattattattacattataatatataatgaaataattatataactcaccattatgtagaatcagtgggatccctgagcttctctgcctgcaactagatggtcccatctcggggtgatgggagacagtgacagatcatcaggcattagattctcataaggagcgcacaacctagatccctcacatgcgcagttcacaataggcttcgtgctcctatgagaatccaatgcagcggctgatctgacaggaggcagggctcaggcggtgatgcgggcgatggggaaagcctgtaaatacagaaacttcactcgcttgcttgcctgccgctcatctcctgtgtgcggcactcgtctgtacccagggggttgtggacccctgcttcaacgcactattttctctcccagacaagatattgagagaaggggaagaattgaatggtctttcttaatcatcaaaagggaccacacattcccaacctgattctgttctcttcatggtctctctgagctttgtagagaaggaaggaaaaggtacgagaagagaaataaggaaaggcaggggaggaagagggggcctcagaagcatcttcaaagggctggatttacaccccaccgcctgtcttggtgcccgggggctgggtgcattcaggctcccagatgagccacagcccttggcctcttgggtccacaccttcatgttagccaaccctgatgtctccatcacccctagataaatggaatcgggcatggaggcatctaatggctaggcagattaatcatatgcttgcttgctttttggaaaccccagaggaaatatctgcagatttaattctcagttaaaggtggaagtgtgggtttgaatcttctatcaggcattgccccttcctactcagcatatctttggaaaggtcaactctgggaaagattggagtgtcggcatcttctacctggtgctgtataaagacttctgacctttcaatggtcctaattccccctcttccttctctctgaatattcccctcctccaccttttttagcacgattatttattaaagttgcaaaggtcttgcattcccacacacacacacatatacacacacacacacacacaaatatatatatatgccacattttcaaataatgagttaccgtaaatggcacatatgagtactcctcaaaattgtcaaggttatcataaacaaagaaagtctgagaaatggttgcagctgagagtctaagaagacatgacaactaaatgtaagtgctatcctcgatgggatcctggactagaaaaaggacatgagataaaaatgaagaaaatctggataaaagatggactttagttaatgacaatgtgttaatatttgttcattccttgtaacaaatgtactctactaatgtaagatgttaatgataggggaaatggggcatgggactctatactgtcttctcgatttttctataaatctaaaactgtcctgaaaataaagtctattttaaaaatggaaaacaaaacaaaacaaagtggtacatgctacaacctcatttcagctggacaatcacaaagtatcaccttggacatgcagctgaaacggccagggtggaggtggggacccagtgagctagtcctcggtaacaaggaggtaaccaagcaatgagctcattacgcacaagcatttcagggcttgctttaaaagccagaaattaaccattgaagatgactccatatggtcggtttccttaacctgttaacttccagagtgaaaacatggcaaaaatgattcctgaaagcaaggaagtctaggatgagctggaaaagagggggcagtttccaccagagggctactttcttttctgagacatgagagatgctgcagtagatgctagagattttccagccagtgtcaggtaggtagctcggatgagttcaggtggcccgaggcatctgacctatccagtctaattttatgcattaaggatattgaagtgggtcacaaaagaagttccatttatttatttatttatttatttatttatttatttagatggagtctcactctgtcacccaagctggagtgccatggcatgatcttggctcactgcaacctccgcctcccaggttcaaacgtttctcatgcctcagcctctcgagtagctgggattacaggtgcccgccgccacgcccggctaatttttgtatttctagtagagacgggggtttcaccgtgttggccatgctggtcttgaacttctgacctcaggtgacctgcctgcctcgacctcccagagtgctgggattacaggcgtgagccacctcgccgggcctatttattgtttttgaatgttgcatttcaatacctcactgaccacaagaaatctacagctttttctctctggattccttcaacctctcccaaattgagcgcctgtcctggcccaatcgggcaggactgaggtgcctggtggtcacctccttagaagtctgcttctaactcccctctgtgtgtgtgtgtgcgcatgttttcctttctcattgacattccagcccttgaaacaaggtcttggctcctttcttattgcaggatttcgttttgggggagctggaacacctgtccactgatcgcctgccactccgcatctgggcctggctgacaggcttgtctgctttgactaatgatgtgattgatggacaaaataaggaagaacatacaaaaaaacatttctgtctggtctggtgtgtcagcaagccttcatcaagtggctgctgaaggtatattttgctgcatggctcattacacagtaatggcattcccaggcaaagctgtttcttttcatgacacaagacagcaggcagctttatgggcgttgggcccaccgagcccggaggaaggagaggcgcactaaagagcggtcatttccaaaagtgcctcaagttgcttttttgttgtcatgaatttaatatgaatcaacacaatatgaaatgggcatgagggatcttagtgactagtgattttttaagactgctgtctaaacagccatcaaggaagaaaggggagggtgaaaccacaacattttctttctccaaacctgttgcaaaaaggagtcatctgtcaattttattgcattaaaaaagtacacagaagcatatagtccaaacaaatgtcttctttcaggctaaacatgtgggaaatgccacatagctgatgccagaatcatctcactcagcaaactgagtattcataacccccattccaatggcctgctgcggatgggggtgacattcgtaagaattacaaatgctactctgttgcctctttgtgcatataataatgatctgaacatcagttctggctggaacaggagagaagcaaagaactgcttcattcagctaacaagatacctgtgggttataacccagtgctggaggatgaaaaggaatcacgattaaaaacaagaaatagagtaggtaaattcttggcctgattttttttctcctctttctttattagggtacagttgagagcaggaacgttcggtttggtcccagagttcctacttcatttttgcaaagtattttagctgtcctcgatattatttcttctttctttttttttgtggcaaattttctttgccaaggtattttattacacatactcctctcttttctttaacttgctggactgtctccaaagagaaatgcttaaaatgaagtttcattttacaaacactttttattctttcttgctagcctgatgagtctttagtggtgggttattgtgaataatatgtgattttaatgagttgtgattagacaaaactctcttcctataataaatactagataataaattagaaaatatatatgagatctttattcctattttaaaagggtgaaagacataaatgcaaaagcttgttatgataaatataaaagataatcttttaacgtgcatttaattgactgtgcttctaagaggcggtggtttgacttctgtgctgatgttaacattgcacagctccaaccaatgcaaactggcactgggatgacagccacctttccaccagggccattagtcgccaggccttcagggggcagggattttcatgtagggcagaggcatacaaatttagaaatgaacatgtgatcaaatccaaacagtcagatgacttcctatatatacaataatgagtataaaaaggaaaagaaggagggaggtgtattttgtgtttttttcattgaaccaaggcagaagtagttgtccaacagcttttgttaatttccaagatccatccatattgttcattacatttccatatcaaaataacaaactgtagagcaaaaggctcatggcattctgttgacttaaaagttaaagcagagggaagtgcccatcaatgcagtaagagagcaggtttagccagaatgagcacaggccagccaatgccaggaacttagccatttagaattgggaggcaggtgggtggtgccatggcagcgaccatttaattaggtacacttttctaggctaaccttggagcggaggcctggtgtcgggtggggggtgctgtgtacccccacttcctgcacttcaggtctgagaaccattagcaagtcctgttttttctccaaactcccaccttttgctgcctttgtggcctggcagaatgttttgctgccactttcttgagtgacaacttcaaagctaagcagtgagatgctttaacctacacatcccctcccactgcttggacccaaaggcttcctctgcaagtgagggcctcaaaggagacctggaacctttattcttgtcctgactttctgttttagaatcaggaccttttcaaaaccccaggagcagacagagggggtgtggcatggactctatgtgagggtctctcgcatgccaaggctgcaatctatccattctccagcgaggttgtttgtttcggagctagtagctgcaggaactattggggagcaacatcatttagcagcaaagatattctttctcagcaaattgcttgaagccaaggggaagaagcttccaggttggtgatgctaagcgcaagagtggaaggggaaggaagccctaacctggggttattttctttaatcttataggagccagccacccgtacacaggctgctctatatattacagcatacattttttctgttcctaatcaggtttgtgtatcttcctggattgattttctttcacaaaactcttaatatttttccagatgcctcctctcctaccttttgtccttcccaactgccattcactaaagaaagactctttggaaaatgttggcctggaagcatgtctattcctattctagtttctggatcctgtcaacaatttttacttgtatgattgtctcattatttttattattttaattgaagtggtggcattatgcaatttggtgaagaactctccaaatccacttggttctggtctccataattcaaaacaagttatttgatgggtgtgtgacttttaagattaacgttaagattgtttgtttaatttgtgggattgatttggtagatgttttcgtgttgaaagaaggctgattggttttggttgggaaatggaattctattgcgttcccagagagtctgccatccagagctgggcagcttcctggaaactgtctgccccaagcaaaagaaagtgctgtgttggctgcctgttgtctgaagtgcagagtccgggggactctgggagctgctaccagatacttgcccccacagtgcctttgaaacactctgcaaggcaagatgaccctgggggaggagcggtccccacctgaacccacaggttggaggcttcttcagggagaggttgacatgcacctttttaatgcatacacattaaaacacaggttgagtgatgtgtggatgcagggaaggccttcctagggaatgacttcagatggcttaatatgattctcttagcctggctgctacttcagttgctggctcctaatggggtcccccttcttcacacaggcgcaactgacattatctctaacctccgccccaacgattccctgtttatcccaaattgtggaaagccttagaacttaatcggcacccacatttgcacatcccagaagagtgggagccttaatgtcctatggggcaagactttgaacacttatttcaagttatttcttccacgtctgtggtcctccccgctccctgctgatggatgatcttgagaaacgccgttaagtggtttctcagatgacagtcttgcgagattaagcgatcggttgtgctccaagttgaccagctggaaaatgccctctcatgtggacttcacctccttcctcacctcaattccctttgctctcgcttctgcttcctaggttcgtaccctctggcactttggcagcacgtgagctatgtgggtgctctggggatgaccaaagactggatgccaaatggtatcagaatgactgggcttggcagttcctcatcagttattctgctggagctttcagggactattagaggctgaatgactccatgcccagcaggtactttcagaaggacttgaggatataagggaatgggtcagggaagtgtggtacaaaaaaaaaaaaatacttgtttgtttgtagctatgccaagatatttcaaacccaaagcctgcctggatcaaacacgtgactttgtctccatggtatgtcagatggcaggtgggccaagcctgaagaggccaagacctcctcctgctccagctgaacacatctgctctccaccttggaagccccattctcatggctgcagtctttgaactctgatgaggtgtgcgaaacaccccatcgacacatcatatcagatatcttttgaaataaaaatctcctagatcagtttcaactcattccaaatgtcatatgtatcctccagggtggaaatcaatcttccctccaccctcaaatgtttgaaatgcaatgtggattttgggtgaaaagctggcaaatgttgagttggggatttgagtcagggcttgattctgccagtgccatgcctaccagggcactggtctttctccatcccatttggggtgtccctaacttcccccctataaagcctgggctcctctgccaggcattgtccccgtctctcaaccgcctctctaaattccctttgtctttcaagggtcagctcaagccctgtcttctgcatcacactaaatctgatccttgcattccatcccagttaccccccaacacatatgatgtgagcggcacaacctagccctgccttgccatattcttcaactggttcatgtgtgtgaatccatctctctagcatgcatcattcttctgtgtgcccacatgagtgtcccttttattgctaggccctggaaacttggtaaatctttatggactgatttatagacattgggaaaaggaaagagatgttcccaatatttgttctccctcctccatcttatacagagtcccttgcctccctctttattcctgccacgtgtttacttgtggagatttatgcagactcacccctgacccaggggatggcagtatcagactcaccatcggaaggtttggttaatcacctgatatttctccaaaggcacttgacataaaacaaaacaaatcaaatgcacaaatcatgtcatatataaaacaaaaatgagcaccataaaaatggagaaaaaaatgtaagctacaatgcatactaactttaacctataaataagaccagggctattttctgatcctcttttgcaatgagagctattgcaaaatgcagaaagaaacttaaaataatagcaatttaaggcaaagtgtgtgttattaaaagtttgtgatgttgaagagccaaactcctattccagtattgagatttaatatgtacttcatacaaaaataaatcatgtaatattttcatggcaggcatagaattttatggcttttatgactatcatggaattgggattcatattttatagacagctctaataacatcaagaaaatgctctgggagaaatgggggcttagagaaagacgagtgatcactcaacagaagctggaatcaagcgtaattaaagcccaaaagtaaggatgcgtctccactccatgggttcgaggcagggcccaggcaggaagagtggggtgtgggaagatagtggctccatggagagtgatcttggcaaaataggactcccctggtgctgacttacttgatcctgcaaatgtccactacggaggtaggagggcaggcagaataacttactcaagacatgaatacattaggaaggatactctcacatttgatttcctggatatctaaccatcctcagcaggggaataggctccattttttgcagggggcagatgcaattgtggagggggaccctaggaccccctacctcactcacccatcatcccagcaggcttctgtttccttgcagcaggactgtctgagaaattaaggtagccaaaaataatctaacagcaaccaccagttgtcaggtgctttgctgagctttgcagggatggtctagatgaagtctcatagccattccatgaggtggagaactggacgtaccgctctgtcttccccacctgggcactagctccctgaatgctgtgctgattggtaagcacagtggaggacctatgtcctcgatgagctaagctttgacacatgattctagaactcctttcccctctgaggcacagattgcaaaataacttctagtcctggggtaggctgaccccttattccagctgcaggtagactctgactcctgtcccgtctcaccactcggcccaggcagaccccccagtgcagtcctgaggcaagtacagcagtggtccaaagtgacaccagagacctgtgccatggccaccccgcatctgtctacaaaggatgccacctttccatgattcctggaaaccttcctttccatatcctttagatgcacatttctcttttaagctcatgatgtgctgagcttgtcccaagtgggttctagacccaactcaatggctctgtgaccttgggcaggtcccctcatgcttcccggtcccagtcacctcccctgtgagaaggggatgaccttcaggctctttgtctttgggacattgttgtggacttcaagggttagccaaagtgaaagctctctgtaaattgcaatgtgcttcaggcatgaagcgtccacacataatgacttgaattaagtgttctttttatttctttttacaaatataaacccaggcgagcataagccaggcagggggtgcaaagccggagtatgcatttggaagccttcgcctggtgtttcagcctctccataccatttcggatgcaactcctctgcccaccgaatactgctgtgcattggcgaatggtattttgcagcaatatttctgctctgctctcagaaatatgcgagtcctgcctattacagcatctgtagagacacactagggaggaagcattggctccgaagggctgagagccaagcagtccccttccctaagctgggccctggcctgccttcccatgtggcactcttgtaaggcctgacctcctcataaccctggccggcaagctgtgatgaatgggaggtcatggtctcagcagaggcgctggacacaaaggacagcagtggccctcattccctgggaacacaaggatcacatatccccataagttgaattctaggagagatggagtcctggctgggcccgcggccaggggtgtggactcttctagaggctgcagccccagacctctacctcccccagatcctggctccttctaaatggaggaagagctttcaatggctgcctgggtggtgcagctctttaggatactggaaaacctctctttaaaggttcatggtcatttgcattcttattaaattgcttggataaaatattcagccacaaccccctccatttgactcttaacttgataagacataatttgcaattgattattgctcaaacattcctggtaccacattacgatctgctcatacatctcaccctctctctgccaatttagaatgaaggaaaaatggtttctctgacctttgacctgtctgaggtgggactgttaggtcattagggccattaggaatcaaaacaccccagtccatagccaacagagacagaaatggatgtgtgcagcaatcagctgagcttattttttttttcttttcttcctcttggtaagatacaggtatttttcagagttggaagacgtctcgaataaatgagcttcgtatatatatgcttttaatgtgatttgcctgtatttatttgggtgatcacaatttatgccaagtgaaaaggttaagagtcctggaaactgaattattccatttatttgcagacatgatacagtgcagggcagcagaagggctcatcctcatcttgccctgcccctgacctcacccctgacctggagatgggcatcgcggctctgcacggagagtcatcaccttcaggggctggctcaggagccaggcaagtcccccagggcaggcagcagtgtccatctgtcatgactgacctgaataagcttttattgagtagcttctgtgcaccctcttcttcctatcccagggaccattctccaggcctatacccctgtgaattccccttgaagggttggccaatgagtggcacccataatggctcatttcttcactgcatttcagtttgcaaacttatcttcccctggattatttctttgcacccacataagagccttcgaaaaatgcatgcaggatttagccctcactgcacaagggaacaggggcacagtaaaatgtcccaccttgttggggggtgaggtcttgggccacgattgatgggcaggaatacaggtctcccaggccctggcagggcacactgtgctttctccccaaccctcagcagggccatcccccaggggccctctagcagacagtttgcaggcttctgactccaaggaaaagctctcatggtgaaggaatagcttaatgggagcattggttggagacagagtttgaggctgtggactcctcatgcccccaccatcacacactcctcctgtgtgcttagccatgcttcagggccggagccaagcctcctgcttcctctttgtgcctgaccgtccctgggctgtgtcctcttggcttgccttctcatcactttcagattaccctggagtaattggatattggtaaccaattactgaatttttcacatcagcttcatcagtgactcagacaactgcaccacagtttctttcaatgaagagaagaattataataatttgcattaatgttctatgagacgtggaaagccaaggtgcttggcctgccgagtaggggagggtggaagctggaggctggaggcctggcccttgacgcaggggtgtcaccccccagcctccctgactacaccctaaccccaaagctgtggccctctctgcccctaccagagcactcacttatttgtccttccctccttcctgatgagagagggtgctgctgcctctgggtggagaacttggggaaggcttcctgaagtcactatgtaaaactgggccttggagacaaagaatgtggaactgcagctctgggggaagatattctcatctgttgtagaagaggatgcaatggaaggcggggcgtggtggctcatgcctggaatcccagcactttgggaggccgaggtgggcggagtttttgagctcaggagtttgaggccagcttgggtaacatggtgaaaccctgtctctactaaaaaaacaaaaatttgtctctacttaaaatataaaaattagctgggcatggtggcaggtgcctgtaattccagctactcaggaagctgaggcaggagaattgcttgcacttaggaggtagaggttgcagtgagccaagatcacgccactatactccagcctgggtgacagtgtgagaccctgaccaaaaaaaaaaaaaaggcaatggaaggaaagagtgggaaagctgaggatgtagagggagttgacctcgcagacctgggcatattatccccgggcccaccttggagggcactagcagacagtcctgcaagctcatggcttcctgtgtctgtgttggagggttctctggccgaggaagtatgggtgacccatgcccagggcagaccagaaatagcatgggggttaaacagccacgagcaaggatgacagttagtgaataaataccctggcttcttccctctccgtgaggcagctccaggggctgctcctcccagccactcagaggttgcccagcaggatcgggccccagtggcccatcctggccacctgctcctaaactcaccctttgttggatttcttctcttccctaacttgtctccctactttttcaacagtgcttcctgggatcctctcccaaatcaacgcattgcccccatatccttctcttaggatttgtttctggagaaacttgaaagaaggctgctttgcatgtcaagtgcaaggtgttccgggttggggtggtattgattgactggattgctgggaatttttcagccttgggaacggccttcccttggatggggcagaggccctgcaagcccaccttcccctgatcccacagactccgcctatctgctctccccaagcccccacgcagcccacacgtgctctgggtggtgggcagcctgatttatctggagtgtctgggctaaggaagggaggtgagcacttctcgctgggagggattttcagctcatttcacagataaaatcaatcagatctaaaccacattcattgtggccatgagaagggagtctacacagcaggggccaaatgggagatcctttcctcccttcccatctggctctgccttagcctgggggcagcaggagccccaggcctccaggctgtgggaggcactgttaccttccagcagtgctgctgcagagacactggtctctgctccagagtaattggcatggccctgacttgggaaacatggacaaaagacagggctgcagctagggcatggggaagaagccaggcaggtggaaaccttccatcagtccctccaacatggatttttttcattttctggatggtaagttagccgggaacaagaagaaagtgagggtataaccacacgagcataaatgtactaattccttttgctttcctccatgatactgaatggaagaaaggagtagcagaagttggatggctgcatggcagtgcctagaagctgccctgctgggctgtctgaggccttcggctgttgagtggtggggatttctctgtgttttccaattgtcctcattgaggaaaaatgttgggccatccagctcctttctagatggcttgaggtcagtcctgcagctcaggaatggcatgaacttggacccctgttaagacttgcatctccctgcctgatctctcagcattgtccacccatggaacttaaacatctggaacatgtcttttctctcctgtagttcagtgtccccaaacagtgcagcaactccaaccaagcaactcaggaggctgagagagcaggcaccccatttcctcctccagttggaggatgacagccttggtctcattccattttccaagctgcttgcatgtgggagggagaccactgcttctgtatgaacggttttctctatagtttctttatagacccagatgggctaggttggaaaggccagtatctcctgcaagtgtctcctgttctcatctagggaaacaactgtgctttgtaacttgcacgtgaggggccaggattagtgaccttgaaggcaacaggccagtgagtatgcagggagtgagctccagctgcctgtccagcgtccatgacctttcttctagtaccagtaccctggtttattctacagaaccatcgcttccccttccacttcatgtatttcatctggaccaccccaatcatggtcagatgacttaagctacaccaatcagaacatatgggtctttaaaggcaacaattgaaagggagaagtcatctcttttccagttgctacaaagattaaaatgcaagcccagtgctctggcagccatcttggcaccatgaggcaaaggtctgcctgagaatggagctgaggcagagggaaacagagcgaacaatggagagagacggacttgaataacattgtttgagatcagggctccagatctagtcttggactcatataatgtgagcttacaaattcttttttgcttacactagtttgatgttaagtattcttgtcatttgtaactggtctacgggcaaatacccaaggctcaaaggtagcccatcatatccccatccatccgtttcaatgaaatttattccattcaattcaattcaactaacatttattcagctccttttaagccctgttctagatgctgagaaaacaaatcagatttttatccttaaggagcttatagtcaagagcaggaagcagagacattagaaattgcctccaatctaaggaagcagatactccaaatgtgctcttaaaagagtgcatacaaatgtacatattaattaatacatgctaattagaagctgaacacagtatagtgcaggaacagagaggggtaggagattaattctgactaaagaaacctaagaaggctcaaaggaggaggcaggctttaatcttggctttgaagaatgagtaggactttgagaagagaagaatgcatgagtaagtgaattaataactgaatgcaacctaggtttaaattatctgtcacgtgcatgggtgccttgtgaagcattagtaatgaagaggctttgcgtataggttatgcctgctccgggcttccaatctagcgaagaaggtaattcctgctgattatttatttatgtatttatttacttttttttttttttttttgatatgaagttctgctcttgtcgcccagactggagtgcaatggcgctatctcagctcactgccaactctgcttcccagtttcaagcaattctcctgcctcagcctccagagtagctgggattacaggggcctgccaccacacctggctaatttttgtgttattagtagagatggggtttcactatgttagctaagctggttttgaactcctgacctcaggtgatccatccacctcggcttcccaaagtgctgggattagaggcataagccatcacacctggcccctgctgataatttataatggaaagtggatcgtgtggaagaacggcttccagctagcagcctaggaaaggcatccggggaagggaatgaagaggcgccactcattcagcgatgaagtgggtcatcctaagactagagaccagtcctggaaaatattcagaattggataaatgagagaaatgggaaatggatggctaccttgagctgggacctgactgtgagaagggaagtagtgtgtaaagggtctcagagaggcttgaatgttgggctaaggattgtgatgttgtgtgatgggtgaagggaagccactggagacagtgaccctgagcatgatgccagagtcttatctgggaagatttgtctgtgcaggggagaaggagaaatcgagtgaaggaaggctgaactcttgaatgcaagtaggagaaacccaagccggactggacattcagtatcagggaaagaagtgacattgctagatattccttgcctggggcctggctcaacactgcagcctttccttcaccaatggcagcccagatttctctgcacagtgggtgggaaatgcacctctcggtgcttctgctcacatatccttgtttcagctcaagagagaaagggattctccctgctgtcccagttttctatcattccggagaagagcactgacaggtttttcttaggtcttgtgtctacttgctgagcaaggagaggctaggatggagcattagtgattagcccagcttgggtcaagtgaccacctttagccaggacacagcaaccagggatgagggggtagtccttactggagcaaagactcctctctccctaaagtgacaaatctcccaggcctggctgctggggaggttcgtgtgagtcatgaatccctggttatttgtgtctgtttcctagagctgggcttattctaggagggactaagcgggtcctgaatgagatttatgggaggagagaagtagagggttagggaggggcagggaaggtggcagtgtgggtgagtgatgagcccttggaacctggtgtctctcgcaccttccacatgagccattcaaagcccgcgatgaagctgggcatctatgtctgctgcagagtctccaggtaccttgttcacaccggagggggctacagcttctgctatttgcctttgggcacctagcccggaacctacaattttaggaggggaatggaatactcttgttagtctgttcaatattttgtaatatgacttggatgttacgtattctattaacaaaggtcataaaggaaaaatcacatttaacgggctacctccttatctcatatgaggccattctccgtggagaaatggtgctgttttaaacagtaggagccctggaggaaaagctcacccatttgggtcctagggctaacattcttacagcacaccagccggaattatcccctccgtctgaggtaccagcaattaggacagcacccccagccaggccccgaaacctggctgagagacacatcagattaatacatcaccaggtatgaaagcgcagttagaatttgactgaggcacttccagcctgagaaagggaacgatttatcaatgcaaacttaataacatctatttgaatctaactaaaaatcaatatttcattaccaaattgttagtgagaatgaagaaaaattgcggaagtcgggcagtttggtgctagggaagcgtcaggagttcaatgtgaagacggaatgattcatgaggccgcaccggagtaagggtgaacgaggacgagtgcggaaaacttggaggggccccctcgctcatgaccttggccgtgacggggggagcacgagaaaatgagagtgactgtcagttcccttcagggatggagccctccataaatcacagggagaggagaagagcaggctggggtggaggtacacgaatgggggtggcaatttaactctttggaccctgacatctaagtggcgcttcccacgatgggaagaacgaaccgaatgggtaaaatccaagggttgggggaagtggtgcctcgtggtgagtttctgcaaaacagagaagagaagaaagagctagcctgtgaaaagttgtcatccactagattcagctacactcaagaccagctcaccttccgttcccatcagaaaagtggaaatgacagcctatgtcttgtctgacatgaacataaatcagcgatttggaaggtctgttctaggtgagggtttggtgaagattttcaccctgaatatattgatccgaaaatgctgtgtagtgccatgactagtggcattcattccccatacgaatgaagtccttgcattccttcccaaatccgagatgcggattaaacctcagggcttgctgttgctttgattattgatctcgttccatcctgtgtttggtttcactgctctggccatgttttgctggcaagacattcaaagaatatgcatttgtcctttagcaaggaatggaggagaatcacataagatttgactcttatatgtaatgctccataaattaaattcgggcctctgctcactttattcattgaagagttatgcatagggacccagcagcatgtcagatgaacacctcagtgcctatctgcgtttgagaaatcatgggaaaggaggtgtagttggccctattggcctaaatctcaggcactaatttcagtagaattccttttaaaaagtgagggttagcctctcagtcccaaaagaaaatggggtgtattttgacagaagatggtaatgcactgttttactcaaacttttttttttttaaatcaaaactggtctgcatgggatccaaggatttaaagatgtgtggggggcattaagtaagctggcattgccctggaaatatgataggaaaggcaagaaaagtcttccacatccgctctttatgggaataaaacatgctctgggtcacactgtgagaaagggtggtggggtgtgtggagctcccagaattgaatttctcagcagctcaggtttcctctactcactgctaggagtgacccatgctaggctacatttcccccttgagagcggtccccaagatcgggaacctgtttaatcttgtgagtgtggagttccttgtgacccatcttaccctaccactgggacacatatggccttatgcctcacaggagcaaagctcttacatcccacacgcagtggtcgtaaaacattcggcaaacactgtttcaatgctaggaaccctactgaactcttccatgaacttcctcatttacaactctgtgagataggttctattactgttatctccactgtacagaaaggaactaggagttaaggaaatcaggtgacctgacccagcacagacaggaagtggcagagcaggatttgaggcccagttcaccctcttggcccattgccctcccgcccccacttgtgaaactgccatgaggtccaggccaggtggttttggctgtgacaatgtcctggttgtcttgaacctctttaatgggatgcactgttgtcctgagtcagtgtcccattgttgtgtgagccagcagcccatgtggtgccacacaactgaactgctgttgagtgtccctgctcatctagttcactatctgccatggagccagcacaacgattgttgctgagagccttcaggccactgcttgtacactggccccaaatacacacttgaatgacaaggagaggagtccaaaaaagagagtcgagttgccataggctctgccaagccacttctgagtacatctcaacaactgaacggctgcccacctctgtggcacgagcaatccctcagtttatggcatttgcccaagcgcgttctgcagaaatcaatgtccgtgacgtgcttcccaggatttacatgctgggaggatttcccctgtggggtttaagggccagtatctcaggggttggcccatcagtgtttgaaaatatgagctggagcggactctggaaatcaagacaagtgtacctctgagaatattatttataaaagcctttttccaaactttagagtcttggtgcattttttttcaagatggcatcaattgcctggctaggaatatgcaatagagtccctgtagaaatgacttccattcatcctcagggacctggctgtggggagcctttagggaaagcaatagggatcccctattgctaaggtatggcatccaatgactggcaccaagggtggtgaccattgctgagaattggctgtagaattcccatttacattgatatcttgacttgctagctggacagataactatttcaaagtagaaaaaagcagacaacacagtaagcatcgaatgaaataatttcagctcaaatgtcctgacgtgcacaggaggccaacactaacaggcagaaacttttaaccggcatgggagggcaacaccacacactagcacagctcagaatcagcagctgcaacccatcaactcgtggctgagcatgctgcgggaagggtttttgggaaacttgaccttgtccaagcttatcaacacctgtctgtcaatgatactctcttgcactcatcactcaccaagggccattttgagctaagtgccttcggttgcaatacacagaaatgtttgggaaagtttggatgtgttgggtatcactgaagaaaagaatatttgaacccaggtctcccagatcagtgtccataggctgctatatccacacggaagaaagtatgtttctcatgtctcatgtatgcattgtgaaatgctgcagatagcaaacaaaaataagtaatagatgcaaaatgcttaccccaggtcctggcacaaaataagtgattgatatgcaacagcaataataattgcttcattattctctaactactgcctctattcctactagtacttctcctgtaattactacttcaagttaagtccaggtttgcttcagggatccttatctaaattcactgtggccttccacaaccaaaaaggctgcgcttaaatgctacacttcatgatttgtagcatttcactctagatggctctcttggttttaagaatgaggggcattccaagagggaggactctgcagctgtaaaaaagagtggtgtctatctccaagaaatatacttctgtgaaacaaagcaagatagagaacaggaggtgctgtatgctcttatttatttaagacaagggggatgccaatatacattgtatattaaataaataaagttaaaagtcataggtgtggttataaggggaagaaagggaaagagtacaagggacagagagagaagctagacttgtctgaatagacctggtttgagtaattaatttaggaacccaatagatattttatataatgatcaaacacaattaattcaaaattttaaaaaatctattcctacaaaccaagggcaaaaaaaaaaaaaaaaaaaaaaaaagaaagaaagaaaccaaaggaaactaactacatgttgatttgattatgtaacctacagagataatttgctttaggtgaattcaaaatagcttccctaatgggttatatcctaagggcaaaaaggagctgccaacatggttttcagtatcatattattagtaatcatattggtattgtcattctgaaattctctttctttcacacatgtatgtagtaggaagaagcaatgaagtaattatgctaatgccgctagaaaagtatttgcataagaaaagaaatacaaatggaaaatcaaaattaaaacctaagtttgaatgaaaaatgtcagtttgaatttgtgatgtattttcttttgggaaaggagagttatttcctgtctgttcactgaaaagacctgaaaatgatgaccaacccaggagtgctgggaatctctacagccagattgtggtctctaaataccactttcaccaaaacgaattggggctccttagagaaatgtctgatcccagattcagggcaaatcctgcagaacacgttgtcagataagaaagcaagaaggctctccaggatgcctgacatggtgtcaaaaaaaagtaagagccaacatgaggcttctgttggccagagacatggaaatttacatggtcagagagtttcactgtgaatattaaccacaatggctgaaatcacattaaacgtgttaaaatccacttgctcgcagtaatacttaaaaaatcaaacaaacaccttattagtcacctttggaggccacatcatccattcattattgtgaaaactggcaaaggcaaataaaaaagaatccagcatttaacttgtgtttgctgtgagaactatacctcaggctagccaaatagttgagaacagaaattactctttatagaagtatggcagctcaaaaaggaagaaatgatgatagattgtttaattcccaaaaataatggatttaggttatagttattaatggctattgacacgacaagaaaagagttagttgggcatcatgtacttccaagcctgaatcatacccagcttctagatctaagtatcagtttacaggaaataaatacaggggacagagaaacatgttaaaggacacaatagagatgaaatcagcaaaatccagaatgaagaaatttctgtaggacaaatgacatgtttttttcaaaaaataaaaatatagaggaaagacagggagaaaaaatctaagattaaaaattgaataaaccaactgtaagccaacaagtaataaaatttttcctgttgtctattaagttgttttaaatttgactgtatatttgatgatactctgctctcattagataggatgtaatgttgtttttttagaagtacaaactgacatatttattgatgaaagagtgtaatagttggggtttgtttgtcacaatactttgctttggtggtggagagttggtgcaattgatgaaacaagacaggccatgatgatagataattgttagagctgggcagtatgtaaatgagagttcattatgttattctctttattgggtgtgtgttggaattttccataataaacgttaaataaacgaaagagtgtgatatgtgatataagcctttttttcctcacacatctattgcatacacatattttgtctggcaccgtgctaagatagcagatagaaagtttgctatgatgcagtcttgtcctctagggactcgtggaagttggagagacaaggctgtggtccagagagcacagggtttgctggaaccctgcaggagggcactgctgctgtgctggaaacctgctttctggtgtgatctgacaccagcagcagccaattctctagagcccactgcctcctgaggactcagcagagccacagaatgaaggaggtggaattatctctattgagatgggaacacgcactagtattactggccacctcaccgagggtactcctggccaggtaaaaatacaccttgtagaatcagatataatgcattggtgtagagaccatgtgctcactggcacacatgacaactttaataaagtccttcaattatctcacaactaactgagcattgctgctccctgatactacagggagtcaggtgggtcgaccaacacctgctgatgtaatgcaatcccttcatgggcgctcatgataattctagtttggggaagtgtgccttgaaatggaagggggaaaaatcactgcatcgggtaactaggagggctattgtgtatcccaggggatgctgtaatccatttaaggcatttttagttcttagccctagtgtgtgcctatagcctcatgctctgtggtttaggatgagctgaatggctgctcttagaggttgctctgctcctgcctaagtctccacacccaggagaaacccacaactcacctcaaccacgaagacaaatccatatacagtggcagcagctcaaagaagcaagtgacaacacagcctgtctagcactaccctgtgcagtatctgttgtgtgccaacccatcagctttgccaaagatgtctctttgtggcacagggagtctaaggtggccattttctccatttctgcttgctatgagatgcagctaaagagttcatcagtgatcaataaagagccacatgcttatgtttgctccttggatctcaaggacacttttttttttctttaaacctcacctgcttttagaggagtccctgctgggagggaaagaacaaaatactcttaaagtagaagagcttctgtagaggtccctggtgtctccttgctccctgaggacagccacagctctggcatctctacatagttttctttgatggagcctgcactcctgcaacaaaagggcctcaggtgagctctccatctgtggggcttaccccacgctctctaagggcttgggggcataaatcaagcaagtggcgattacaatagtgggagacccagctctgcctctgggcaaagtcctgcccttggggatgcagaacactgagctgttctccataaagtacagcttggaatcatggagcaggtcaagaaaatgcacacatttgaagaaaaagaacagaggacagaaggtagaggtgggctgttttccaggaaccagccagaactgttgaggggagaatgggctcatccaaggtattcatgtgcatgtatgagtcctccaagagcacagacaagtgcctgatctctcactgtgccacagccatgacagcacagagactttgacacacacttctgagcctgaagttactcctcccttctgcacatcctcttccaaattccccttcccatcttcccctctttaacatgaaagctacccttgactgtgagatagcatgaaagtttgggcaatttcttgaacacacatgaagagtccttgatgattcaagttccatttggtccccatacacaggtctttccacagacaaacgagatttcttggggatttcatatgatacagttgttccttctccatgcaagttgtagtaagtcttctggcttcttcttactttttaccaccatgttcattgtcaaggtgtcacaggtcatcactaaccgttttaatgtcttctatggacacacaactactggcattaataggccaaaaaaagcgctgcagtgaacagtctctctaagtattgtgtagaccacattggttattctgtatattggctatacagaaaaatgtgtgtgtaaatgagtatgtgcaaagtagacctatttcatgttcatagaagagtctgagaagtaaggtttttatgtgggatttcaacactttcatctcctgccttaaaagctatatggtttgatcatctgtgtggatgtgatacagaatgcacccaaaaccctttgactaaaagcttcagagtgtagctgtcttaatttggtttttaaaatacagagatatgggagcctctgcgatatcaaattccagaattatttgcaaatttcagaatatgcttgaattttgccttcttaagtatatgtagttaggaaacaatatgaaaaatccacttaatcatgatgagattaaaggatttttaaaagctgagttgcagacacatttacattccccgataatttcttaattttctttcaaatcacctttcatcttcataaaatgaactgtaaaaatccttctgaattccataatgtgccaagaaaaatggggaaaaattaaggaggcccctaccttttaatcattctgttcataaagtgctttaactgcacgccaggaaaaaaatggaggctctggtgtctgaggtattctgtgccataaactcccataatagaaacagatggtgaaactgccttggaagtgaagaaactagtgtacacgcagctcaccctaacatatgaagagattcagggctgacacatgaaggaatgcatttggcgtggtgccagcagtacactctaattcagccgtgagtgttcaagcttgagatgggagacccacaatttcaggatctggaatgccggcagctccaggatttagaatgccgtggaaggttcttgggctctttccatcctgccatggaggacggtgttctcagtgtttcaggtgaccgtgagttccaacagagagctcttcctggcttttataaatggttcataaaaacaatagtggagaaatgccaggtttgctggagcttcctttaactaagttaggatttgctttttacctagagctgccgccagtggatgctgaaagaagagaaaatgtgcaggacaaagagacatcagtgaaaatgatattagacggaaagggaaggaccctggtgccagccccacctgtgaccctagttgattggatggcacgtgcaggcaaaggagcctctcttggatatcgtgttttcccaagaaaattgaacacatttccatgttgtatcccaatggcattaatacatgcatttttttttctatgtgctgtattagttagggtgggttaaattctgttacacagaccccaaaacgtagcgatgcaaacacaatggaagtttacgtgtcctgtatacagcagtctagggtgtgcaaagtggtggggaggtctctgtccaccttgaggctccccatccagcggggtcttttcacctccagcacccagcaggtgggagggagagagcacagtggaggcccactgctgccttcagagctgattcccagagttctacattccccttcgactcataatccactggtcacaaggacttgagtgccacagccttgcacgtagacagagaagttttgatggacagctgcattgtggcacgtggatgtattaactagatgttctgtcgtcccaggagggtcttgcatgttctccccacctattcaagcctgtctgaaattgatgctctcttttcccttccaggaaatgtggtgtcctctgatcctccttccttcctgagaactggggtccttgcagatccgccaagtccagaggtgcccagtggccctgcatttccttccaccagagtcagctgaattcagatcaaaacttagaagaacgttcctccctccacgggactcagccctgaggctggggtggagctggggaccagacccagtggaaccctcattgtttatcctctctcatctctgatctcaggcactcaggtcccaaccgttctcttcctagcctctttacttctatggaaatcactcagacattgagagacccctgttgtgagaggttgggagactcaagctctacaagcacaagccaatctcagctgaggctgagcctgaactattccttgtgtccctgcaacaattctccttctcagcactggcaaatgatgtttgtttcccaaaagcaaggaacatgtgaggagcagagtgatatttccacttaggaccaaaccttccaataggtacaacttccctcatgccattagccctccttgatccagagaggagacagccaggcaactttagtctctgcagggcctagtcctaaggtgattgtgtaggatttgggagaggaaggggagagctgaccactctgatgttaccctgagatggctcctgtgccgtgactgactgtgctgtgaccaggagactcagcttacctggagtggggctgtagggacacatgagccaatttcctaccttaggctggccagaggctggtttgggagcaggactaggttttgaggggtgctaaagcttaaacagtttgagaggccctctaagaataagagtatacaattatgagtgcaaaactgctagagttcctccagggcctgtgcctggtgggtggggcaaggggttccccagagacttgagcttcataaggactctgctgtgtatggaagtagggggtagggggagaacaggcatcgtgtctaggttgtgtgcaccagccagttagtgctggtagcatgaggcagttgaggacatctggggctgagggtctttctgagagcagctgatggaggaaagggaggcccttgcagaagaaaagtctttgctgctcagggatgggactgaaaggctgattgtacagattcctgaccccttcagagctgattcagcacttctgcatcacctgaagaaagagaaagagcgctggtgccccttctgcttctccagcctgctttttctgactgaccattccctaccctggtcaccccttcacctgtggccacagacctctctccagtaggacttatagctggtttcccattggccatgtggcttccatgagagcatgcattctcaagagtaagcccaacactgtctttccaggaggctctcctcaccctcactccccaccccacttcctgtacctggaatggtgtggggaacagtacctggaatggtgtatggaagaagcctgattagatgcatggaaggatgaaaagatggaaatctttagcaggttcctattgaatggaaggatcagacactgcctcacagctgcttctgtatttatctttcttcttggcaagtcttgctttgaatagactgcaagccccctgtaagctggctgtgtgtccattgcattattgttaatctctcacagcctggtagagggctgagtgctcagaaggatctgagcagggctggtggtgcagctgactccatcagtggctgctgttgacatttctctagcatgggaagacagtggaccctcggtgtgcaagggaaagatgggctgcctcaggcatacaggaagctgctctggttgcaggtatactcctagaagactgtgggggtgtggcagccatctctgcaggcaccaggcaggggtagctaggggtcagcctcccatctgtttctgctcttcttatcctcctgttcatagccagctcccttgagagccttattcaggctccatgaggctcagttagattctagggaagcttcttttttcccattgcagaagggtcagcagtggaggacaagaggccaagtagcctcagaatattggggctccaggaccccaaagggatgtttcccaactgattctctaggcccataaacagatgggttccctgagggccctgctctgtgtctgggggaaggaaacacccaggactggttgaattccagtgagaacgatgctgccgttgatttgtggtttgacagtcaaaaataatccaagcattgctttgcatgtgatttatacaagtgtcttaattggcatcttgattatatgattgcgtgaagggctgttttcaagaaggtgtatctctaaatagaaaaaagaagaaatatacagctgtgaagtgtgcgtgaagccccccaggatctatgccttccctttgcttttatgcactgacaccacattttccagtttctgcccctagactggacctttagtgggaaacatttccccaaattgcataaatttttcctgcagacatggagcttggtttgcagtttttctctggatctgctgcatttttctctgttacacaaacttagtgatgtggtctctcctagtctgattacagctaattattttagaaatatattttaaaggcaagtgatcttaactttatggctaatccaatggagaagatctaagaaagacctgaaaatcataaaatgttccagaacattatattttatgcagtccagaatgtgacacatggggtctttaataattcactgcttgttaacattaaacaactgttaacatgctcaaataattagttatgcttgcttgacatgtttgcatctttaataattgatgcatttatcttaattactaacagtattatggtcgtaatatgcatcttttttctatcttagaattttaacaaaaactgactttttgccaaaaatgattatgctctaagttttaattactcattgtaattaaattgcaagctgcagtattttactaaaatatctttcacaaaaatatttaatggaaaagaggtgatttgttgtttatgtagccaagttagtaaatatttcataagtttgatattaccctttcagagtggatataaaatagcattactttcaagatatgagtcaatttaaaagtcttctgtagcttaagatttttctaccatttctactcaaaatgtcattcccccgccaatccaccaccactatagaaatctggtaccactctttgtgtggaagagaaaggtttctttaaccagccaggcaagtaggaacttgaacctctgtttcaggaggtggtgttgattggaaaccaatagaaaagcgatgtccacactttccctccatttcctttctccagccctgtttatgtaagctagtccagaagaccagcattggggtgactgtttgattaaaatgcaccttaataaggacgcagacatatgtcccattgtttaagctttgtccaggtgctcatgcatgactggaagcttactattgattgagaaagacctactgcttttgagaacattagcgctgtaaaagcctgggagattatgagaagcaaccacttcatttactgacagggaaactgaggcttgcaggcctttggcccaagctcacacagagtgacccaggtagataagaacttagatactcagatgacatgtccagatctctgtcttatacacctacaggcctttcctttagcccgttgggctatctttgaggattcatcagggttcctgcactaggcaaaatctatcagcacaactggtcagttccacagaaggcagggttatgggccaagaccttgccatttcttaactttctaggccccttactgggattccattcatctgggctctattttcactgttctggggctcacctaggctggaagcatcaagaagtacacgtggttgagatctgggtgatgccccaatgtgttttgctggttaattagttactgctgtaagtcatcagaggttttcaagatgcaaatcaagcaattatggggctatttggaaatgacaagcagaccaagagtaaatctcagccccagcagaatgaggcccggcttactaaggacccggaactcaacccactccagtctgcatcctgaacacacaaaactcttttcttcgtcatcaaaactgcctgacttcttggggacctaagagaggggcagggccactggatctgtagcatggggaggtgtctcagttcttcaccatcaatttcaaaagcacccagatcaattaagatgcctttagtcatagcaatgagcacaaaatctcaacttatattgtcttgaaaaatgtggaaatttactattccacaaaactaggtatccagagcagtggggaggagtgaggtagaacgcctccattcacagcacagtaatctcatcaaggacacgggttctttccatctccccagtctaccaccctcaagatctgcttcatcacaagccttggcccccttgggtcacacaatggctgcagctgttcagctaccatgttcagacacaatatccagaggaaaaaggtggcactgtctgtctctgtgctttccatgtaggaatgagaaaatctttcccagaggccacagcagattttcacctatgtctttttggctagttctgggttggacacttcctcctgaaccagtcattagcaagtggaatgaaatgaccaggattggcttaaatttgtcatccccagatagccttggcatagtggagtcaaccactgtatccaatatgctcccttatgtcaatcaatcaccccttactcagcagtcattctcagctgggtatgttcttcatgctgggtacagtgtaaggcactccaaagtagataaaataaatagacacaggctctgccctaagaaagtttttgataatagggaaatgagacatagaaacaaaccactaaatggaaacctactgcaattgtttagaagaacagctaacaaacgctgggctcagtacaattcatcagggattttctaaacatcttctatgtgcatagatatagcttaggtgttattgaggagacaaaagaacataaaaatgcattcttcctgttaaagagcttagttaaggtgtccagatatgcataccagggactttctctgtctttcccttactccagacagaagtacagatggctcttggcgagcttaaaggagtatttatggggagtaatttcagagcttctgctgggcctttgcataggtaagagagtggccattaagatgtgtctgtcagttgagaaagcttttcactctaagtaatagagaaccagattaactgtgtctaaaacaccgaagacatttattgtcacaaagtctccaggttgttactcagctcatcagtgcaatcaaggtttcagaatttttctctttcccttctctcacctttggattgctagactttcatctgtcttttttatttttttgttttgttttttccctcatggtggcaaaatgaccattgcagccccaagcatcaaatctgtattcaaagcagccagtgctctgcgggcacactttctctttgttcctgttctttttatcaggaagcaatataacttccttaaaagtccaccaataaacctcccttatatcttgctggtcagaacttggcctcctgggcattgctgtgtgcaagggagactggaagactacaatgagacgtggaaaaggagtggggtgtgaggaaggcagtggatttgccaatccatcatgcctatcacaggaggcgtggctcagtcatatgtctttctttcataacaggcaggaggaccaaaggggcacaaaatgagaacagaaagttggaggaggggacccactgtgccattcaagctcttgtgagtcattagtttcatcgtaagagtttcttttcaaattgtggagcagttgggcaaatatttctttcccctattatattttagatggcactgtctaggatagttgttggctttggttaggagtgtgtgtgtgtgtgtgtgtatgagtcaacccattgggcaatttgaagaatcaaaacaaaacaaaccgacaaacagcctcaacccctggtactagagacatctgtgcatggatggccttggtgtatctaaccctgtggttccctttccatctccatccctctacttgttgcaaacgtagggaaaaccctgggacactgagaaacaggtggggcatgggtgatttgcggggagaggggcattctttcacaagatgtggtagagatagctgagccttgtgcaagagtaagactgattttctgatcacataaaatgcaaagactcagcattagaaagtctgatgcaaccttccctaccaggataaagtctaaacaccttaacctagcactaaaaaccctccaagatttggaccctgcagcttccagcctcaccagtctgccaacagagacagtcttcatctccacatcgccctcaccctgggttcctgtgtgtcttcacatctccctgtttttattcatgccccttcccgtgtccagagctcccttctgctccccgtccctatgctaagacagttcatctctccacaccctgctggacctttcctatccctaagcacagacctcagggcctgggcctcctggagccacccactcagcagagtcacagcagcctggggccaggacttcccttccaatgactttgccacagtttggctgcacagaaaggtctgtttcctgcatgccatgtctgtaagagtcttgactgtggcccaggtgcaagagacagacatccttttgttgtgatgagaggagtgattcctagccttgccacttcttagctgtgtgagcttgggtgaattattgaacctctctgtgcctatattttgtcatctataaaatgggcataacaatagcattttacacgtgtaggaagcccaatatggccctcttcaggctctcccattctgtaaattactcaagggttgcttccacaggacagggatggcttagaaagtcccagcgtcacttccacctgtctctcctttctgcttctgatgagggcacttcacagctggcctaggcttgcttccactgcaggcagggaagacagaaggcaaggaggccttctttgcccagctctctgggcagagccttgctgatgctccatgctaggtatccactttactgctccccttgttctgagagctgcctggttctgctcaacacaacagaagggctggtctggaaaggcctcctgccttagactcccactggcccagagccaggtctttcttctgagccagtgtcagacccccaggccctaatcacccttgccctgcctgtttctcagtgtcccaggctcttccctacatttgtgataagtagagggatggagatggaaaggaaccgtgggatgagataaacctatccgcgcaaagatctctccagcactaggaaatgaggctgttggttggtttattgtcttttaatttgattcttctaattgcccaatgggttgaatgcccaaagggcattcctctttggagacttctgtgtcctttctgtcctgtaggctaacttggtccaccccgacaggctgcctcgacatcagttcttaggatgaagatgttacaggggcaatcaatgggctctctgcccaatgcacagagaggcttttgagaaaggaaaagttttattgtgagtctactggcaaggagacaggaggaaacactcactatgtctctggagctgagggctgggttggattttataaacatagaataatgaggtgtgatctgattagatcttgcaatgaggtgatgacaggcagcatgatctgattggatcctacaatgcggtgatgccagtgtttgatctgattggatactggatcctactattcatgtctgcttctcaattcagttcgcactcctcagtcccagtgcttaggttacccatggtggttgcacagttggctcatctgggcatgctcaagttatgtgaccttccacttggggtccatggccactgaacaacagctcataactttgttacaagaaagttgagccagattggcctcgtgtggttccaaagatagtgggatctgtttctcccgctataaaatgagtaaatggcatgtagtcagtggttttgaaaaattatgttaatcactgcaaacctttacaaagcatttccaggcaattccatgatggaagctggattctctgggtcaagtagggcaggcatgggcaggggaggagacgtttccctccccagcctctctgccaaccgcccactggagatttgcttgggaagaaggttctcggaagcaggttctgcaccaggatgtgtgtgcagggacatcctgaggaagggcatccagggaactggtaagggagggggaaaaacatggaagagaaggaaaccactcaagggcgagagtttctgaagtccctcaaagggtagccacagcctgatcctgctgggggactttgcagtgttagttacaactcagtgtcatacacttctaggtaagggaccgcagctttcaagcctagattaggaatgacatccaaaccccatgggggaggtgagaatattcctcagcattttatactcaaagaggacagagcaaggcttgcagccttctgagggtggtctgcccaagatgagctgctggtgctggctcctggaagagaagacccactcaagtcatgggtcacacaggaaatgatgaaattgagtccccaaggaaatccgggcagagcaatgacatcatgtctctgtggggaaggtgcctgaaaccgagcagatgagggccctggggcagggggcacagggagaggtgggctgcctctccctggacgtccacttgtctcctttgccaagcacctaatcccaaggatctgcagagcaatggagggggcagccgagaggaagggcggacagcagagtgagaatagaggctgtgcccctgcagagcacttttccacggatgtgtttttctttcagactttatggttaatttatttatctgaccactcgggaagggaagaaaagtaccattttatgagcgcaggacaaaataaaaaacaatagcacatttaggtgccttaatttttctgttcctagagatttatttcattgtattatatttgacagcagtcaacaaacagcaaataggcagccaagtgcagttctcttagccgtaatggtttgtattctctgcacaaggcagagttttttttttttttttaccgcatacatcatttggaacttgatacattgatcccaaaaagtaatatacattacttttgttctcctgacataaaccagcaaaacaaatccagtggacggagtggggtggggccagacataagggtgtgactccctttgggaggggattgctgtgagtttagcacgtgtgtggggactacccgagaatgtcagggctggtgaggcgcaagcatgtgattaggtgagggcgttgtgtgagtgttcaactgtgcagtgtgatggggttcaggattgcttgtctgtgggtctagtgggaagcaaagtgatgttaacttttctagtagatatgagaatatgcagcctgggaagtctttgtgttcgggtgcatccaagcaccctgaatctgttaaagcttacatcaatgtcgaacaagtgttctggctttaagggagtggtcataatttgggcaacccttatgccccaagattgtcagcctggaagtcacatgggggccacatctccattcatattttaattcctcctgttccatgctctgggattccagtccctaccttagaactcctttggttatctcagcaagttcctagggtgctagtatttctcatgggtttctgcacccacaagtccttactgctgtcgttgcttggatccatgtggatgatgtcttctctgcacattgactcctctggcatctcagagactactcaccttccacagctaatgctgggctggccaccaggaagggaatgggtcctttcactaatgacctccaatgcagctgaaaccaggctgcaacttctggcaagacttgactgaggggatgacagcatcaggaaatgaagtcacagcatggcaagtagatgcggctgtctccatagcccacaggctcaggcccattctgccctaagaggctggttggtgcagcctgccaacttcctgccagtgtgtctccctgtgccaggaactggcttcttttgtcctgacagtggcaaatccacatgcatgactccatttttttggagtccaggttcagtttgcaaagaggccagagaagaaaactgttcttgggctaaggccagttgctgcttcttgacgccctctcttatgacggttgacagtgggtgagtccagttccttcaaaggaaagtcttcctcctcccacctccagcttccttgaattatggccacagaggatcaatggcatgagagtgacagagactacttgggagactgcattgtttgatctgtccccccgacaataataacacataacacgctagtcttcgtcctgcctggtcagggaggaaagctttgaccatctgctccctgcaattggagtgcccccagctatgatccaccagcaatcgcttatccctgccactcagccatttatcagtactgtcctgtctaaatcccaaaatacaaaagctgtactccccctagaggaacaaaaccttctgagattcggtgctggattgatcccaaataccaatttacttcccctgaacgaacctcgagctctgcttgcccaacaatggtgagttctgctttctccaaaacactgggagaggatgtgctttccattcacaccctgcagggccattcaggtggatttaccccaaaggaaagcagatggagtcttcttcataggcattttcaaatgtcttcctattctgagagagaaaacttatggaactattgagggaacagttattccaatgctttttttgttcccagggaaaactgaaacaaaccttgtaagtcttatcctgggaaccatgtgatgtgtcaattggcttaggcaggaatttaactttcagatggtatagagcagccacagtttggctggtactgtgcctggcctttgaggctacagagataaccgggaagggtcccagcccacagggtacgagtgccaaggagagcacgggtgaggtaggaggtgggatttgactttggaggcagggctcaggcactggaccaaattgatgactaagggctggggcagaagcagctttccataagacacacccactaatgtgccatgtcagtttaccattgccatggcaacacctggaagtttccacccttttccacagcaatgacccaatgacctagaagttacctccattttcctagaaatttctgcataggtcaccccttaatttgcacgtaattaaaagtaggtataaatatgagtgcagaactgcctctgagctgctgctctgggcacactgcctgtggggtagccctgcttcacatggagaagtacctctgctgctgctgtatactgcagcttcaataaaagttgctaagaccacctgctagcccttgaattcttttctaggtgaagccaagaaccctcctgggctaagctccagtgtggaggcttgcctgccttcattacaagcttatcctcagagaccccacagtgagtggcccctgacaaatgccagaaccaggatcccagagagtgacaaggaaagggggaggcagagatagaccctggctggggaggtagctgtttgtcatgaatcttatttattgctctctactttaggaaaaagaggtacagaacaagctgtctgtgtacgtcaaagaacttaaagggccaacaagtacctctgagtccagttgggagtgaaaagaacccaaacactgatcccacttcttttttttttttttttttttgagacagagttttgctcttgtcgcccaggctggagtgcagtggtgtgatctcggctcactgcaacatccgcctcccaagttcaagcgattctcctgcctcagcctcctgagtagctgggattacaggtgcccgccaccatgcccagttaatttttttgtatttttagaaaagacagggtttcaccatgttgggcaggctggtctcgaattcctgacctcaggtgatccacgtgccttgggctcccaaagtgctgggattacaggcatgagccaccacacctggcccccacttctttttaaacgagcatgtggaaatgaccagaacttcctttattctctgcaggtaccactagaggtcagctgtggagggttacagagcagctccaccacttcatcccacacagaccctgccaaccacggcagaatggagaggagccccctgaacctccacctagccgtgtgatctgctcagggttccgtgttttgggggaggggaaagaggccgcctctggggacactccacactctgttctttctgcctcacagggtctcagaagcttccgaatgatgccccaccacttgcaagaggggcaggtggtatggaaaggtctcttcacaggcacccctctgcatgtgcggccctcagccctgcggcaggacaccatgctgtccatgtcagtgaaaagaaaggggggccagtccacgctgtgttggaacacaggccccacacatgtgggcatgtgtttctgggaaccacatggtgtcaggcccatgctagccactatcaccacccaatctctgcctggtgccctggggcttcatttggaaggagaaagaacctgggctgtcagagccgagacaagccaagctatagggtaaggctgtgggccccagataagccaagctacagggcaaggctgtgggcccctggattcccacagaggagccaaacagccaagagacgagactttatttacaagtctctctgtcccaaacagcccaggcaaaatgtcacgggtgagttgaggagccgggaagtcactgctctgccctgagtttcttcaggtacttgctgggccagggacagacctggaatggggctcatggtgtgatcattttatgagttgtggacacacaaagagatctccatcaagtcaccttgggtcacctgggatattcacagaagtcccacaccaggctccataactgtactgggaccccaagtctccccctgcattcttctttgagaagtagaccctcagagggaaagcccaacagggtaggaagacccaggttcttccactgtcatgagtgcccacagccttaggtctctgggccataagaacatacgctacctggggcttctagcccatatcagagaggggactctgagtcccaaagtcagaggtttccgggaagaaaacattgtctgtcttttcaatagagacccagaagtctctgccctgggagaccccaggtgacagtctttcagaacccctgtgggtctggcattcatgaaacctgagacactgaagatgtaactttaatggtctccactaattcatggtctgcctttatgcacttaagaagagaactcttccttcttatgacacctccatttattcagaattagcatgtaaagtcctaaattaggcattccgcactcaggttctgacagagccattactttttatgctgagagagttgagttaattttaaattattgaggcccagcacctgagtgaagtgagcgtcttcacagagattgggcatctgtaggccctgctaacacagagacacaactggaatgaaacccatttctcctctgctgaccagatgcatatacacaatggacccagagagaggtctggcattgccattaattttgccagaatggattttgggcagaaccaggcttgggtctgcctctcaggaagcagaaggccgacttacaggtgcaatctgcttgcccgacccagttatggagtggaagggccttgccttccccagcaccagtctctaacagccacagtgctaggcgctgagactgtgtttccaaggagtccttagtggcagagacacttggggtgaatgagagtcacattatagttggacaggagaaaggaaccagagcctgttgatcctattctcagtgcatagcctcctccctggcacctgcctcccagcagggcagcagagagctgtccatggacttcagaaagttgcttctggaatctcccgaggcctcctcctcattgtatgcggccagcatcctttatagggtggtcactgcaggatacctgctgttctgtaaaatgtctgtgaccttccccaccacccagggtgcccccagtccccctcgttagattgagttaagatgagccttgcatctattggacagaaatcggcaacagaattggccagctggaacacgggcagctgcctccccagctgccaaggctgccgccaggatatgaggagcttgagcctccagccagcagatcccagagatgcctgtcttcagtgcagtcctcattcctggaggaccctaactccactggggcatctgtattccaggagaacccctctcctctcccagtagcccaagttttttccagagaattcctactctcgttggcccctcccacttcctcacaccacactgccaaaacagcagcactcccaattgtctgcctgtgttgtctccagggtcatagaaggtgggatgtgggaccattctaatcagatgctaaacagtttgaaatttgcaaataatcacactgttgacattaattgctatttttactatctgcaaaaatttgacccattgtccaagtaaacctaacagatatgtggattatatcagttggggctgccaaggtgacactgtcaagttgatttcatgtcattttaatgtcttctgtaggccctatactctctcaaccagaggtcctctggctagagtggaatggtcagagcttagaagcttgttctgcccatagaggcagttgttagcctcagacaaccggggacttccaggtgagaggactggaattgttgtctgtcctggaggctgggagagtccaaagtggggacagtgtggacagcagagccatgctctaggatcagcattctgcagactgcctggagcagcgcggagcctcctaggagcttaacttgatcaactttcagcctgagctggaactaaatccaatagagattggcttggagcaagagacagctggctgcctgggccctctggacagcggccccctgagagcggcaaatcagaaacaggcgacaggccaagcccagcctcaccctggtgtggaacacaaagcagacccactgcgcattgtggaagactcctgtgggtttctgctcctgaccttgagaacaggaagaacccaaggttcccactgcacctatcccaagaagtccatggtctggctcaggccagaagccaaaggcctcctggccaccctatgctgcaaaacactcacattcatctactgggaaacgggcagcatggcaccgaggagtgtcgtgttcagttttaaaatgccacaaataacagatttatagatttttctaaatacattattttagcttgacagcattaatcattcatgcttccttctttcatttttctacctgcaatggattattgaaacagaaaataacaacgagaaaggctagcagcagtatcaaaatgtcaagtttgtacttacagttgtatgggcccagacagggtcaagagccccaattatttgtgtatgtacacagtggtatgacacgaaaggttatgtcacctgcagctattttcctgcagatttaaataggactgatattcagctgtacagtgagctgctgacatggaacagaaaattgtaaaatactgcaaactctggtgtcagaacctaaaatatgaattgggtgattgtaaggtatagctgtgggcagtgccgcatgtcgtggtgcaaatccgctcaattactttgggttattcttggcctgcactttttcatttaaacataaggcaagagtgaaatcacaggactgggctgagggtaaaatgtcaggtctgtctactttgcaagatgccttctagagaccaagagtgcacacaccaaccagcctggacagagagaacaatatgcatgtgaatctacaagggtgacctggggcacccctcggctggtgaagttggatagatgatgggacaataaaggcctattatgcatattctgtaattttttgttttcttttagaatgtagccattatatggaaagacctgcaggaacgatttgccatttggtcaataaatgaaacgttgattttttaaaaaattaattttattaaaaaaaaaaaggcccggtgtggtggctcacgcctgtaatcccaacaatttgggaggctgaggtaggtggatctcctgaggtcaggagttcgagactagcctggttaacatggtgaaactttgtctctactaaaaatacaaaaattagtttggcatggtggcacgcacctttaatcccagctactcaggaggctgaggcaggagaatcacttgaacccaggaggtggaggttgcagtgagctgaaatcacaccagtgctctccagccttggcaacagagagagagagactgtctcaaaatcataataaattttttttaaagatggaatctcactatgatgcccagcttggtctcgaactcctggcctcaagcagtcttcccgccttggcctcccaaactgctgagattgcaggcatgagccattgtgcctggccatttttttttctgtcagtgaattccaaccctatgtcttcctcacaaggattctgtgagtatctgtggtcaatagacttatggtatcatacatgggaataaagccctagaaggtactacaatatcctttcgcagacagctcaatatctcatttgatcaccaccgccacccagtgagatatgttttagacaagacaaacaaaacaaaaataggataaacacagatatagataggacatggttgagaaaagaatcaaatgttaaatgccactcagctatcaattagcagagagggctccaccccacatgcagatttcagtgccccaggtgctgtggataacttgtgagagcaccccttctgtccctgcttcaaagggcagtgggtctgcataggctaactggtcctaggaatggcacagactcttgttcctggctttcctaccactggggctttgggaagcaactagcttgttttaggtcaagattttacggtttagcttaccagtagggaggataactcaaaaggcagtgatttccaattctaacatattttgtagtgccacaaaaatgccccctctagaccaacagagatagagagaagttgacttttggacctcagcctgcctagtagctctttatcccgatgccatcctatctctccatgcatggcacccctgttctcaacttcccatgtgttgggtgagccactctcctccagtgcttgagaacaccgctcacatctttgctagttctgtctcaacagtcttaaatggctttcctccccgcctctactttttcctttccaactatcaaatccttgctctctttttcctggctctgctcaagacctcacctccttcaggaatcttatcaggcaattcctcctgaattacttaggatgaatacagaaatcaaagtgaattgccgtggacctcagcagaagagagcacttatatcaggatgtgaaggatgcacaggtttctctaggaaacaaagaaaaaaagatattcctgggcttcaaagctggatgaagtgaatagataagaaggtatgttatatccacacaagaaatgaaggactgatacacgttataaaatggatggatcttgaaaacaagcatgttaagtgaaaaaaaaaagcaagttgcaaaagaacaagctaggtccatatattgtattaccctatttacacaaaatgtccaggcaaattcatacagacaaaaagtagattagtagttgccaggggttgaggggagaggagaatggggattgactgctaatgagtctgaattttctttttgaggtgatggaaatattctgaaattagttgtgattgttgcaaaactctgtgaatatactaaaaatcaccgcattgtagagttttaaaaggcacattttatggcatgtgaattatagctaaaaaatgatgggaacgggaaccagggacaagatgttcccaagagcatttcctctttttttctcatctgtttccttctctcttctgagcagcttgttggcttgctttgctccccaatccaaagtaaagaaaatggcctcccataactcccaaacttccattcctttgcacaagagactaatcagaatgagtcaggaatctcttagtcctgattccaggtttccaggagaaaagctaattggtccaaattgggtcaagtttctactcctggaccattctactgcagttaggcaatctggcttcttaatataattataggaagtaaggggaagaggtgcatccagaaaaggggtagaggaaggataggctatccactatatttagactatccaccgctgatattgatcttccaattacaattaaggtgttaaaacctgttatatagacatagatagacatgaacacatggataattctcttaactcttctgctaccctttagcacactttcctacatgctacttcttgaccctatctttctgtgacttttttttttgctatagatagtttcaaatatattaaattttaccctacgcaagggccactgtctttcttttgtctctatctctgcagcattagatgcatccctggagacttacactagagttcagcatggggagtgaggttccggtcggagatggttccagattgtatacaagcttatacaactttggaggatgtctttaagaatacattacatatacaaaattagaattggaagtaaatatttacttaggatgagaaaagaaatcgccaaaaatatacatttgaaacagctaacaagtatcacaaatatctcaggaaaaaaaaacatattttattaatcaatttttaaaattaattaacattctgacacatctcgatggtatatttttttcctaccgttttttcggcctgcattctctttgatcaacaattttataatgtcattttctatagtgggactgaaaagatccttcctctagcatgcataaaacatgcaaattcacactcagatgaatttgctgagtgacgtactgctacagatttgtgccttacaaacatatgaattctcatacattctgtttctcttattcctcatcaaaaaggaaaaggaagtatggtatgtttataattgtatgttttatgttaaatatattccttatgggagatgatttccattttgactatgcatcaataataacctattctacattaataattttacatgtctaatgactggaagaatttccatagactagcttctggtttcatacactgcaaaccattttaattctctacaaccctttcgaggtgccactggatacatgcatatgtctatagagactctggccttgcggtttcatggcttgcatgggggtagattgatatagaaggcaaatcatttctgcaagccatcaatatggcaagcatacaactacacacagaattgactacaaatacattaatgcatccctccaaactcaaaatgaacatatccacattcaacctgtctttacccagatcccaaaagtgtccatagcctctctaactccaactgacactagaagacttatggtggagaggaagtttgagtgggaagagacagtgttctcaacaaattgtagctaaaacctttgggatcttccaaagtacaggaccacattcctaaggtttagggcttaggaaggcacccatgcaggcaaaaggccatgaagatcaagctgtatcagtgtcaaggtaaaatgacttctttttatcagtgtaaatgttatgggatattagagaagggagagatgggtgcatttgctggatggattacaatggggtacatcttttcattttcttcttaaatgatattaagagctggggttcaaaatctaatagtcttagcccaatctcttgaagcacagtgttccaaataatggaagaggggatccatgtctcttgggtctccccataactccatgtctaccacctagtaggacctagcagatagatctctgcacagagatctgatagatgggaaatggatgagggctgcagctcttgctgtgaggatcaaacaaggtaatggatatggaagtgttttacaaatagaaaatttctgtagcaaaatatgtctaacaaaagagttcagtttggttgagatgctccctataccattgattgaggataatcgttagtatttttggaagacatcttccccacccaacaaatcaatttgaaagaggcacaccacttttaagaaagactaaagtctcttgccatcttctgttgtcttctgtcatcaggagattgtgaagaatgggtgggaaaaattcttaaaccatagtccaggttttatataacaccagtatttttagacatgtgcctgctatgaactgaagtgtattttgaaaacttaataaaaagcagatattaacccacaaatgtttcattttaaagtgagatgaatcttcttccctgccccatcaccaaccctctgctattctaagtctcttattctagccaggatttttatttgtttaaggtgacttagcaaggtatctatattgaagtaatgcatcagccaaatgggagaactgctttatcagatactgtgcaagtgaccaaagactcttcacagagaagcttaaataaaaaagagaatattcttattggattatataagttatataaatggaaactccagagttagaggctcaggcacagctgggttcagagacacatgtgatatcgctgggacctggtctctctcccactcagctctgctccgtctggtgccaaggtggttgccaagagctccagatctccatcttcttggttttgagtacatgggaaaacaagagaacttcgtcctcaaaagccacagcaaagttatcattgtgactctgagctctgataaggtcgtggacccatccctgaacctatcgctggggacttcaaagtgtgatgatgtcccattggtcaggactgagacatgagtctgccatggtgggaaaaggattgccagtcccaatctgaaaacacagatggagaatgggagaaaggcggtcctccaaaacacagatgctgggcaggatgtccaccagccaaccaccaacccagggctgaccccactccaagccagctttgaaacaattgttctatgacttagaaccaggactcggttctagcacactcactaaaaaaaaaaaaaggtctctgaatcatcccctatggtggtcaactggcaagagaaaggaatcacttcaacaaaggtttatcttaaccaatctacccaagcaaaggtgacagcaccaagtccccacatccattgtgtgtgtgtgtgtgtgtgtgtgtgtgtgtatgtgtgtagatatacagaatgtactttttcatagatggctgttaattacgattcttcaccaaggtggtataaacagatctctgccaatagaaacttttaattagatttattaattccagaatgtagttgaaatgtggtgaatattgattgtaatggcctctgttttaaatataattaattcacgatctgcataattgctcattacctgtatcttaattatggggcataaaacattgtttatcactaacatagtcctaatggggagaggagctcactctgataacttaggattcttggtatttttgttgaagagagcaatgagacatttcattttctttagagggagagagaaaaaaaatagaaagctgtgtctccaatgacaaccagtatgcacagacaacctgataaacacagggcatttatgattcttttatgactacattttctgacaagataaagtaaatactcttttgtgggactttacaactgcacaaggctaaagctactgtccaagaaaactgaaaaatttgagtataaatatactagtgtgtttaaggctggctcatgggcaatgaggatatcctagcagcttgacaattttcatataataccatgaagaatttcatggtttttcttcatcttactgctagtaccagcacaatacatcttttctagaaaaaaaaattatacaaatctatggcactttctgttttttcccatataccataaatcctaaagatagttcatgtgcctattaccgttagcatttttttttaagtccgagcaacaaaacctgaaatatgccacatatacaaaaaaaatcaggttgccaggaaatctgagttaggtgagattttagtggtttttgattctgtcaggtttttttgggggggaatttcttttacaaagactgtggtctgtggacatccatctgtgcctctttgtgagctcagcacttttccagtgggaaagagttgtgtacctgtttataggagcttgcaaatgtcatctatggtaactgacttcatttggttatagaaacaaagcaagattagcgagaagaagacacggtacttttgggccaccttttcctaatgctgcttagccctgtaggggaagctggggaaggtaaccagtaattttagatcatcttctcaaagtagggaactctttacaacagaatttctcacaagccctcatcattgacaatgcatttttgttcatattttttaatgcctgcatacatgtcacagaatactactacatgtccttaatcctaaaaccagttggctgccagtcacctgaacttgatgatgtagtcactgtaataatccaccaaataatgcatgacagtgagctatttactgaggacagtaagtggattggttttatctaaatgtacaaatctgtattaggtcccaagaagctctgaaaattgaaacaaaaactgaagaaaaaatggacagtcgggaaaagggagaaacatgttttgctgcactaaaagccagaaaaagaagccattgcatatttttagcaaaatgcttaaatttcatccatgtacatttcctctgtcttcagttaagtgtgagcgaccggttaatagtatctaggtttctgacaaaaaaagcaacaaaataggagctaattctggataaaggaaaacactatgttcaaagcaggtgctacttccctcatactgatcatcaaggaagaagcctgtaatttctctgaatagaaaatctctctttgtctagcccccagtaaatacatgctgacaaatattcacatgctgtctgaaaggtgcccagaaggtgcacgttttctgtctgggtccccagtgagcgaggagctccatgcctctggaaatagggctgttccctccgaaatgggaactcagtctggccagacccctaacattgtgaattactctgctgagctaccatgatagtgcactatggacgggctggtttaaacaaccaacatttattttctcacagttctggaggcctgaagtccaagatccaagtgtcagatgtgggcagagttggtttattctgaggcctctcagctgggcttgcagacggccaccttcttgccctgccttcaccctctgtacctgttggtgtcctaatcttctcttcttataaggacattgacaaatcagaataggacccaccctaacgacctcatcttaactgaattacctctttaaagatgcaaatacagtgacattctgagatactgggggttaagacatcaacatatgaattttggggggagggcacacatcagcccatcacaaatagtaacatgaaaaacgtaagcagaggtatggaaaactgctctgtcaattataaactattagataaatacaaaagaacgtccccacattccctcccagtgcccacactaaagggtgcattttgagcaatggttctcaatcgtgtgagttgttgtggtggtggggggggaagttttttaggggacacttggcaacatttggggacatttttggcatttctggttgtcacaggtggagggggttgctactggcacctagtgggttgaggccagaaatgctggtgctaaacaagccaccatgcacaggactgctctctgcaacaaaaattaccccatcgcagatgtcaatagtgccaatgctgaaaaaccccaatctagaaggatctgccccctttcctttccttttaaccttcttcttcttctttttaaatcagtgctctcactttcatggaataacctgcttcttgaaggcagaagagaatggcgtctgaaaaggaaaagggagcaaagcctcttccaggaggctgctcccaggagccgcagagcctgctagcggagctcctgtgtgacctgcaagccaccaccatgcccaggctgccttagtgcttctccaagatcatttctctgaagttagcgaatgctccacttttccctccaccagagttatgattgctttactcttcagttttctggaaagctcctctcagtgtccaaaaagctaataatgaaatggatgcctgtgaccaggggttacctccatgaaggccttggacagctggggaaataattctgctccctgcatccaaccacacaagcattaggcctgcctcatttcccctccccccttccatttcatcctctgttacatctaaatttagccctctccccagtgacccagggaaagatcaaagctctctttgcattcctgcaatctggagaggagggagcagaacaagtcctgagagtaaatggggcaggaaatggtagaagcagagaggggggaggcacacagggatctccaggggctggccgaccccagggatatccctggagaccagaaggcccagggaattgaaggggaggtcttgctcctccatgttctaggtctctggaagtgtcaggggggtgaatacctccttccagcagacagggctctactcagcccacatggtgagatcactggctgggccccttggctcaagcctcccacctcagggtcccttcaccccacttccccactcagcagattccctggggcctcccttccagtcctgatgagggaggagaaaccatttgtcttctgactagcagaaacagagcctctgtctcaggctgggttccctgggacgggctcaggtgttgagtagcaggcaggtttttggggagaaccccctgtgaggaatggaggaaggcaacaggggcagagggaaaagctgacagcagcgcctcttgagtgaggcctcggttggtccctggggcactctggggttgggtggggccttcagagctgttccaaatggaggcaagggggctgggcctttgtaccctatgagttcatcccagagagaggtgagccatgtgccctgttgcaagctggggcatccacagggggtcatctgggcagagcacctcactattgatactagcctctttgaccaatgcaatggagagttttaaactcagacaggtgctatccgttggccctcctctggccatctccccagataacaagtaagcatcagagggaaaatgcccgtttatggtttgactttcactgagaaattcactttataatcatatctttgagaagcaaaggttgcactgggaaggggccagggagggctgagttggggcaggccttccccgggcctcacacggatgggagactgcaggcctggagtgcaggcttggagggtgggagaccactgtggggcaagttgggcaggaatggaatggccacaaacctccccagacttgagtcaaatcgctcttttgtgaattttgtggttcaaataagtgttttctgttttcgttgttttttttttgagacggagtctctcactgttgcccaggctggagtgcagcggtgcgatctcagctcactacaagctccacctcccggttcacgccattctcctgcctcagcctcctgaatagctgggactacaggtgcccgccaccacgcccagctaattttctgtatttttagtagagacggggtttcaccatgttagccagaacggtctggatctcctgacctcatgatctgcccacctcgggctcccgaagtgctgggattacaggcatgagccacagcacccagctctgttttcctttttgtattttgagacaaggtcttgctctgtcacccaggctggagtgcagtgcgatcacggctcactacagcggtgacctcccaggctcaagcaatccccccttctcagactctccagtagctgggactacaggcataggtgggactacaacaccacactcagctaatttttaatttctattttttgtagggatgggggtctcactctgtttcccagcctggtctcaaacttttgggttcaagtgctcctcctgccttggcctcctgaagcgctgggatgacaggtgtgagccactgcacctggcccaaatagacattttaatgcaagtcatcgtgaagtggaataaagatagttaacaactatggttaagaggcaatgtgtgcttatcaaatgccgggccctgctgtgagcagtttctgtgtgtgacactcatttattctctctgtatcctataaggtagatatgactgttaatgtcttggtaccttaacttcccacctataaaattggcccaagcaacttgttggagcgacttaaccaagtaagcagtggagctgggctttggcagaggctgcctgttgttggctcctgcagattgggccactgggcggccctccctcccatgctgagaacaggctgaaggaggtcttttgactatgaccctgggattcaaattttcaacatccaagagtagggacaggaaccaatgtcctgttttgtaaaccaggaaacaagcttagggagtgtctcacaattactactggtacagaggccagatgccaggggctttttacagaaaatcatgctgccccatgctgggcactaacattcataggtcccttggacatctttgaatgaatgataaaaatgcaagtttctgttgctgtaaaatattgttcagtaatagtatattatgtattcatatcatagaattccaaagtgggagagggccttagaaaatattggtttcttctctatccttgcagagtgagaaactgaggcacagagaggagaagtcacttgcctaaagccacacggcagctaattacagagccaagattaggtttctggatttctgcctcttagtcacagtcctattcgggaagcaaactgttttggaggatggggaaagaggaggagattacttggctatcagtgaaattgatcaacagagtcaacatttaattaaaaaatatatcaaaacctttcttgataatgatcgacctgttacactggcacaattaaagtggtgattttattcactgagttactgccaactcctatgattttttttttgtaatacccttgtgataattcaattggaaatatgtggtaagatgcagaaatataatgccttttcttaggataactcatgccacagccaaccagggagttgatctgatgggtccattgcagaactgaggtctccttggtgccatcctatctccaatggctctagagggacacatcagggaccttagacagggcccatatttgaactggtgaaacgcatccccatgtgttcaacagcactgaggctgctgcacgttagaggtaattaggaataggcgctttttaagatttaaacgataacttttaaaaattaaattttcacttaaaatttcatgagacagaaggacagctactatgatataaatgcttgcatctcctctaaattcatatgttaaaattctaatccccagtgtggtagttgtaggaggtgacgcttttgaggggggtgattaggtcatgaaggtacagccccaatgaatgggatgagtgccctcacaagaggccccagagagctgccttgcccctttccccatatgaggacacagccaggaggtgccatctttgaatcagaaagcaggcccctgcagacaccaaatctgcctgtgcgtttatgttggacttcccagcctccaggactgtgaacaataaatttctgttgtttataaggcacctgacttacggtgttttgtaatagcagcctaaaaggactaagatgacaacacccccactccgccaacttcctcatcccactctgagaatcttccaaggatggacagcctacagctctccaggcagacaagctcacagaactactggtggtggctgcttctattctgatgagcaaaggcctaaagccatgtggatcttgcactttgaaagtgaaatcatgagcccttaatcactgaaaaacataattgattcccatttctctagttaggtgtcctggtacactaatgcctcaacacagtttgttggggggtggatgagaaagaattccatgatcaattaaatttggaaaatgctacatacaatattgccttcttggactcacatactaaaagctctgggatgttctgagtcaatgaatcaatttaatttttggttcatcattttccaatttatctgaccgcagaacgctgtcttcatgcatacctatgaaaaacgtgaagaacccattttcaaaaactcctaattgggcagaactagactgaaactgattattaatcaaaggaggcttaggcaatagaatgaacaatctgccaggggtcaaaagacccggattctggtctagactctttctttaattagctgtgtgactttggggaaatcacgttcttctgggccttggtttccttgcctataaaacaagagactgaaattagatcattccaaaggccccttacaggggcgatatacaatgatttttctgatttgtgaagactcatctgctggtaggctgtctactctctccttacctatcacagctcctgttggcacctgcagggcctgcagggtggcctggaatctgctccaggccgggggaagtgcattataatccttgaggacattcggataggattgttgtgtgttcctggcccaccataggctggtggctgtgccagtcagtctctctctctctctcagaactcttccctctgtgcagaatttcatggtaagtattatgggatgacgcaggagacctggaccctctaccctctgcccctaggattgtgagtgtcgaaggggaaataagccaggtccacacacagatgcaagtgatcacacgcagcagtgggtgtcgacaggccaggtgcttagcgagatcttagaggaagcttcctcctcaaggtctgggtcattgtagagacctcatggggcatggaggacttcacaaagccagaaagatttgttgaattcaggggttcaggggcctggatagaaatgaggatggtctcagtaatgctaggacaaaacaataccaagtatggttagcggctggtgagtctctctgcatgagcataagtaggcagaaggagtgggaaatcaggtggggccgggggctttagacagaagacagcagcctgtgaatgccaatgcaatcaggctctagggtcacacaggcagtgggtatccattcttcaggaaaaaagaaaactacaaaatactaaacataatactagaaatagaataattcaaacaaatatgataataaagtaaaagtaagctctttctgcctcttccagaagatcaaccaataagacaagttcccatagaggtgatttaatacactgtcatgtgcaatgtttaacatcagtaataataaatcgtaaagggggctaatgctttacatggtggagcatagaaagaggagtgagaggcttagatgaggaagggagatggaacctctgccctgtgaaagaccgcaaggggtagctgggcactcctgcgggagctttcctttcattctcataaaatgagaaacagtgagagtaaacaactgttacggtaaatacttaaacaatgattaaaagacaaaggctgctgacatcagtcttagtagagatgctactacatatgagttctaccgtcagagggcctagagccactctttggaggcacctgcttatttctcctgcctgtgtgcttccacttaggagtctagacaaccatgctcacagggtctgtctgcaggtcactggattgagcaaggactctcaaaatcaggaaagacttccttagacaccctctcttgggttctttctccttcttccctgtgttccaggttttgtgctcaaatctccagtgttcattcccagtgtcctccttccccgctatgcactgtctgctaaaggccttcaggagtgtctcatagtggtcatggtcactgttccactcacctggtgataagtagaaacctccggccaaagtctctgggcacaaaccccaaataccatcctgggctttctgttagaatgccaggtggatagagtgtgtgtgtgtgtgtgtatctgcaacaatgcctttgcttccaagtgacaggagctctaactggtaagaacaacaaaggggatgtattggctcatgtagtgggaaacccacttgtagagaggactttagggtcactgcaatgcttttctttctgcctctctattctggctgctaggacgtcagcttcattcaatggccgcttcctctctttgagagaaagatggaagccagcaaatcagctggagtatgttttcttccccaggaaggttgagattgtgagagagagagagagagagtgtgcttctgttttagaagagtgagaaagatccttttacagaagctccaggaaaaacctcttttcatatctcattggcctgaaatggaacccaaagtcattcctgaaccaatcactgtggctaagactagggggctgggcttcttttcttgtcttgccaatcagcacctaccaccaggtgctggggaattggtcaattcccagtacacatttagtacaaaagaaggagaggaaactctgcaggggaaaagaaaggattttcagtaaaagtttaaaatgggtgctggaaagtcaatcaggagctgtcccaggacaggagtttgaccctatgaagactactgcccaatcattcatcatttctgaaactcttcttatacatacaagcccttaactgggcccttgtgtatgtgcctagatcagttacgatgcttctggctgcaagtaacacaaaatcctgactccatctgtcttaaataaccagagaacgtggaatctcacattcggagtaaggacgtctaccggagacagcccaatgagctgctcagtagtcaacaatggcccaggttgttcccgtctctcttctctcttgtcctcaccatctgtttcatcctaagtcttctttcttttgtattttcgaggtgactgttgcatctctagacatgacaatccagaataacaaggagaaaccatctcttgtgatttttcccttggagagaggacattttccccaaagcacctgggctgaaatcctatctccaccactcagtggcaggtggcctcaagcagcatcaaagggataataatagtccttgaatccttatgaatatcagtggagtgatcccgctgaagtgctcaacaccagccctggtacactgttgttctcagaaacgaggagcttgacttgcctggtgtgtcctgctagttgaaggtgtttccatgctctggcatggattgtctccgagtatcccagtgttcagtacgcctctttcaggtgtctacagccaaagtcaaggtcagaaaatgaaagctttgggggcttctctcccttttgttgagccctttgatcaatctcaccctccacagttcctctacttattaaccctagggtggccactttgctctaatcatcatgtttgctgaaaggccccaatctgcagttccctgtctgaaaaaaaaaaaagaaaagaaaaaggaaggaaggaagaaagaaagaaagaaagaaagaaagaaagaagaaagaaggaaggaaggaaggaaggaaggaaagaaagagagagagaaagaaagaaagaaagaaagaaagaaagaaagaaagaaagaaagaaagaaagaaagaaaaaaaaaaaaaagacaggctaacaatatatgtgtcgggacctatttttagtgctttacaaatcagatcttccctcccggcctcctcctgtccctcaggactttcagatttactacttaaatatttataaactgttacaattatttattaaaggtttatgttgttattatatttagtgtggaatatgcatttcgtcctccaaaaataacaggactttccattaaacgacatctgttaatgatgcagtaaattgactcttaaagcaatagagaaagttctcttctcctttgacaaccctaagtacccttatttaaaagtagaggccctacctcactggaaaatacattacttctgactccccaaatgttactctatgcagatttaggaaatttgtagtgcttacacagagaaattttaccctcagctatcaccatctagtcaaaagcaacagatgccttcgtagttggtagcccttcctttcctccaaggcttctgttggtgcataaatgtgcacacacatgtgtgcatgtgtatgtctttgtgtgcatatgtgtgcacacacgtatgtgtaagagaagcccttgtctcagctcagatttatttgttcattcattcagtttaatccactctgtgttaggtgtcaaacttaaggaaatggataagaaacactgccctgagagattcacaggactaacagaagagcaaaaaataagtaataaaatatcaatggtacataaagaattattaagcagtgtagatgtacatgtgcaatgccatggaaacaaagaagcactaattttgtagagggatttttttttgatgtacatgtagctctatgtgtaatagcaaggcttaatttgagaagaattatctggcttttttcttggaatgggacttgccttccatcactaggttgctaacccatccatctgccagtgttacccagaccatggtctagcctggtggttctcacccaggggaggttttccttctagagacatctggcaatctctggaaccattttaggtgatgagagggtgctaccggcatttagtgggtagaggctagaaatacagctaagcacccagcaatggccaggacaacccacacaccaaagagttctctggccccaaatatcaggagtgtccaagttgaggttgagaaccactgtcttgctcaaaagggtcctgtgggggtgggagtcattctgaacaaggccagtgaaattggcctgagtttcttggaggagagctgagatttgacctggagagacagttaagggtcttaaaatgaccactgccccttcctcttgacttggtgatttaccatccagaaatctgcctacgaaaaattggtcagaatggctgataccgaattatgcacagagatgctccaagctacaagagaaacaggaacaaaaataataaagttaaaaacaacctaaatggccaacactataggttggctcaataaattaggatatatttttaagattttaaagatgtctgcaagtaactttaatgacatatacaatgcatgtaattttaaattcagtgaaaaggaatgtcccttccccaatctctctttttgtctcacacacacagaaaaaaggatggagagaaataaacctatgagttaatacctgttagtagatgttgggattagagatactatttgtttttaattttactttaatttttcggtattctctagattctcaaaaatcaacagaaacaattttcttagttgttttcattttttaaagattattttagactgggcacggtggctcacgcctgtaatcccagcactttgggaggccgaggtggttagatcacttgaggtcaggagtttgagactagcctggccatcatggcaaaaccgcgtgtctactaaaaatataaaaattagctgggcatggtggcaggcacctgtaatcccaactactcgggaggctgaggcaggagaaccacttgaacccaggaggcagaggttgcagtgagccaagatagtgccactgcactctagcctaggtgacagagtgaaactgtgggtctcaaaaataaataaataaataaataaaataaaaagataaaatgttggttattttcgaaagatggcacatcagtttagaagccaagagaccaggatactgggcttggctcatcccccagtagatgccatgatgtcagcgacccatagcccttcctcaccttcctcagtagatctgcttttgcacttggtaccaggggatgccaataacctccaccttcctgtctttcagagtggctctgagaagcccaggaaacaccacatgggaaaatgcaaagctgaataaatgaaatggttgaagatcgtacttctggtaggaagaagttgataaattcttcctatggggaggggagggtaaggaaggggaggggagggcagggcaggggacgggaggggaggggaggggagggatctggatctagcctggttttccctttgctcttggcaggtcttggggcacccaggagccaccatggggcattgcactttacagatgaatttccctacctttgcaggaggaaaagcagtggccctctggttacttggttgcctaggatttaaagctgggagtggactccacagtgcgtttttgtttgtggttggaatttttgagttatacactccctgggctgttagctgaaatattagtgcatcctcacaaataaaatcactccaggaaaagcgttgctagaatttccaacaaaggctgtctttgcccttccgcgtacttcctagatgggggttcttaagccactcctcggaatctgaatcctaccaagtgatgcctgccttctgcctgctaccctgggcccctggatctgctgtcctctggcacaggcatcatttgctccctggaagctggggaaccttgcttggcagtcactaggaaactagcttagaaaaacagcctccccggcacctgtgccagcaggcaggaatccacctgctttttccaaaagtgtttgcctgtagggagactgcctgaggcccacgtaaattcagaaatttctggggtttggcttagcaggcccagagggccccggaagacactgagtgatttccctctgtggcgtccgtgagagtcagtgtcactgctggtgagtccatttttcccactcagagagttggggcaccccctaaataattgaagtattagtatcagtttctttccccttctgcaggcactcccagaggtctgccgttttctttgcaagaacagttggcattaaatatgctgggtgtcagtgcagcagttaggtggttaattttgactgaatattatgctatataaccacttggcatttaacttgaaaaatggctttctgcttcacctgtcagcatacccagttctcatcaaataagtgagtgagaaaaatttttaaatttcaatttcctgatgctattagacactacttcttccatacttaaacagtttagcagtgcatgtgcaggtttttgtattcagaccatgcctgagactacatgctattacaatagcttttttgtttaaagggtaaagagatgcatggatctttatcttgaggttaggaaaatgtattgcaggaacacggccaatcaggttctgaataactttgaaacatggtgccatcaccccagtgtagtacaaggaattccagtgcctacagtagaggatttgagagtgtcagaagaaagccttagaaatgaagtaaatgtgcagagtaatcccgcatggtacttcagggggaaattgatcactcaggttagcattaatctatttttactgtttcttttgtcaattataattcagtaaaccatgccaaggacttacattcatgaactctctatgtttaagattaaaaccccaggctcatccacttatgtgaattagacatctccagttgttcgtagttcaaacaggttgattagtgtcacctcattttgtttatacatcccgaaaatgaaaagccggcagagggaagatgacagtatttgatttctatgtctcagaaccactttgtcataactcatttttatggtggatgtgttgtgaacaggatgggaaacgtgccttgtttgtttaagaaagggtcaacaagctatggcctgttggccaaattcagcctgcctcttctctggcctgtttctgtaaataaagtattattcggacagaaccacacacacttatttatcggtttatctgtggctgttttcaatctgcagagttgagttgtcccaacagacacagtatgactcataaagcgttcttatcggccctttacagaaaaagttgtctccctgtaatttcaagcttcaaatgctcattttcttccttttgtgattccaggcctaatttttccatatctttagagggcacatttctagaaagagtgaatggcttgagaagttttgtacttttgaagaggttttttttttttcttcacttaggctggatgagggggatgtgaaatcattctgttttacagataagaagactgaggtacagcagggttcagtgacctgttacaggccacatagctgggaataaaaagacaaactccattcttcatgggaactgtggggattaaatacatcagtaaatgtaaatgggttgaaaaaatgttcccagcatagagcaaatttgcaatccttgctaaatatgattattccctttattttcattgttccagggccctcaccctggtataccaggcaaccaggaagaagggatgcctgctgctgtaagcctgtgccagcaacacagagacccaggccttcagcccaagcggggctctgtgcctccatcggaaacatgaaccagatttccttgtaatgggctccatatttaggcccagcagccttagatgtctggccaataggaaagctatgtccttcctgcacaatttcagccctaagaatctgtgactctccctccctggaggcctagagaacaagaggagggagggcttgaaatcaataaatggattgcacacctgcagggctctgccatttgtcatctgtgagctacgcagccattctggggcttacgctatcctgagctgcgtgtgtttccatggtctcccattatgctccactttgacccctcaaaatattgtttcaacttccaggaggctggatgatggggagagagaggcaaagagagagggagggagcaagggagttggcagaatgagagagggagcatgtccaaaaatgccggctccagccaactgtatcagatgccagctgccaataccaccctggtccctctgaggtcagccaggtagctggagcccttccttgccttccaggcaaacaggctgctactccaagggaaaacagccctcaaatgcagccctgctcggcttctcagaaggctagggaggagaaaggggattgaattaaccaagatatccaacatatcgtctccagggtgaagtagaaaatcaacagcatgacctttaaggccactcactcattcactccaagataaattctataggtgcccatggtgtgctggggaggagaggggaggggaacggacagctcctacccctaggagctttgtgtcacccatgtcatcagccgaagtgctggcttaatagacggaacttgttctaaaggtatgagaagagtaaattggagatggtaattgcaggaagtgatggcagagggaagaaagaggtggtgttttaggagtagggtctggagctgttcccataaactagggccatggaggaagcggctgcccatgagggttgtgaaaccacagaggtgatgccgctacaggcagatatgccacccctccacaagcccagactctcaggggtactgcagacagttatctgggctcattccctaaggccccttttaacgagagagtctcaagacagcggggctgggagcctgtgaggcaggaagaaagttccagctaaaaagacaatccccattagttcagctgggactctcaagaagatgagcgctttcctaaatgcaatgaaggcaaggaataagaaggatgggctttcctcccaaggctgctgggagctcacttggtgaatatgaattggtctccttgccaggcggggcctcagctccccgacctgtagcatgggatgactgggttggctcaaaggtgttacccatccatgttatcaaagagaacagttttaaagctcaccacttagaagatggagctttagagaaaagacagtacccaaggactctcaggagcatcgtgcatggggcctgatatggcaccacagcagctggggtccagagactctggaactgagggctgagcctgagagacgtggtgtgagtgtgagtgaacaacgcattggcacggtaggtgcgtgtttatgcatgacagtcttcaaaccctgcttctgcagaaagcacagtgaccatagcagatactgagttctgtcgtggtagggacctgcgccaccagggcctcccttcgtccccagcagcctggagcagggcctgctgcgtccctccccagccctcacccctcccagccagttaagagagtctccagccaggaactgatttgtggatgtgcctcaaggtccgccagtgtcacagtcccgtgtgatttatcgcctgctccacacctcacactttctgttgtgtgctaatgccccgtccttcatatctttctttaatcatgagagagtaattgtagatatttaaacacttgagtttcctgcaggaatttcgagactgggttttataggccttttataacagaacaaatcacagtttggatgaaattctgggaattctcttgcaggataatcatgttcagattgcctccctactgctagcttaatgtggctgtccaagtttgggatttactggggagccaatttgttttaagaaattaacaaaaccgatacctaagtaccgcagtgaacataaagtttttattcattttggtgaaagggaaaaaaaatacccaacattctgctactcacaaaacagctcttgaaaatcatctttatgaaattgaatctctctccccaaatgattccccgatgctaagcgggatggccttgtaataatcactcccttgtattcgtgcgttaaccggttcaaacttcacaggctttgcccaacccaagggtctcatggcaccggctttatactttttaaaattttatttatttatatttttatagaatgcagggagccacacagatgagagagaattctcaagtggggaaagtcatatgtggactgtgagatttagacacaaaaaaggaatgtatctctcacaccccacaccccacacatacacaaagtagatttttttttttccaaaaatgtggtctggaaaaaggaaggaagaaggatgcctgtcatggagctggatgtgtgaaaacctctttgaaaagcaatgacatttcctccttgggggacctcatcttccctttgctcctacctggtgctgaacacaggaagttcgtgctctcccttcaccatcacagctgcttgggaaataaaccacatttaaatcaacccctttgtatctgccagcagctgctaggcctctgaaggaatctctcctctcaattcccttttggtgaaagaaagggaatttgcacccagacaggggaggctccctgctgggcacgagctgactgagtgccctggcccagggcaggtgtgggtgtacggaggggtttggggaagggccctgagattccatttacccaaagggtattatgactctaaggtgccttcttagtctgcctggagagtggggagccaccatgggagtccgagaccacggacaggacaacagaaactcactgctggggctcattccctttgggcagccccaggcagttacaaccaggatgactgcgacgctgtggaaggagcttgcagccagtggcccttctgcgtgggcctctgtgcggagcatgggcagaaagaaaggaaccaacgtactcagcaaacagtgctcggtgtatctgctgccaggcccagtgctgaaccctccaggtgagacaactcgataagacactactgccccgccatttgcacctggggcatgcgtcacaggtgtcccaagacctgcatggattgatttgctctctctaggtaaggacactccttaggattgatgccactgtccaacctggcctcctgaatatgcaagacagagtgtgccagggaacaaagttgccacatttcccacatggtccagccctgggtaaggcatttcctgggcagtgcaggcctctatggccctgttcacctcattccctggagtcttgtaccctacacacacgccctactgttccctctgctgcctgggactcccagccgtctccaccagccagggcctcaccgagggtccatgcagatcttagctattcacaccggatgctcctggagccaggatgcggcccttcagaccttggccatggtcctgtgtggcccatagttgtggcaggcttccacatctattctttcctagctggtgccaggtcccagccctgaggtctggggtagaggctccctgggctgccctggttgtgacacagatggctctgaatgtgcttggctttccagagcctctgcggcacctgtgctctggtcctgcctggccctgtaggctgcgacttccccaggaggcccagctcactgttggaacctacttgctacctgatagcctttactgcagttctagcctagaacctagaaccttgacggtatcaagacagtcagatagtggtgaaatatgaggcagggcagctgtttgctccacgtgggtgtggggctccagccggggcctcagcatggctgtttctccctcaagtcgcctcctcggtgccccctgccgacccgttgaactctccacggccttgagctgcacccacctcccttaacaggcttgcagggtcctcaccaaagcacagggctgcccctctggagggaaaaagcctcaggtggtgctgctcctgccttcctgtgaagtctttccagtctccccacaagcatgggttgagcacctactgtctcccttcacaaggctaagagctggggatacagcagagactagacaaagtccgtgctctcctagagagtagagctcagtagcggtgacagatcacccagaaaaaggcaaatgaagatcattttccacagtgagaagggccagaaatgaaataaaacagggtgatcaggatgggatctgggggtgcaggtgcccacattagacatcatagtcacggtgagtctctctgacacttgaggaggtgacccttacaaagtgtcaactaaggccagtgctcctgcctgtaattccagtgctttgggaggccgaggtaggaggatcacttgagcccaggagttcgagaccaggctgggcagcacagcaagacctcatatctacaaaaaatttaaaaaattagccaggcgtggtggcacacacctgtagtgccagctactcagcaggctgaggcaggaggctcacttgagaccaggaggtcgaggctgcagtgaaccgtgatggtgccactgcactccagcctggacgacatagcgaaatcctatctctaaaagaataaataaaataaaaatttaaaaagtggtgactcagtgagcggggcagccagcatgcaaggattggtgggagggaattttgggcagaggaaaccgcaacagcaaaggctgggaagtgggacagagcttgcctagggtggccggggctttagggtacgaggggaagagtctgcccactgaggcctccgagtctgagagggaggcaggggccagatcacagggcacagccatcaaggtgaggagaagtcgaggctgggctccatcgtcctgccctgctcctggctgacgtgaacccgtcacagcctggaaaacacacacttgacacaagcctgtgccagcagggattaggagaacattgttgtcttagaagaatacgtttttaattaacaggttttatttaccaccgtgcgttctctcttgctcacatggccctgttaaagagcattttaaattatcagcttttatttatcacaagaaagtctccccagtacgggcactttcctgttgttccccatgctggcctgagcgagcagggagatggggagaccaggagttcaaccctgtcctctgcaggcctggccccagccttgcagttggacacacatggccttctcctctcctctttcctggccgctgacaccggggcaggtgacagtcaccttttctgatgtggtttgcccaagcagtgtctgaattaaatctcgccagttgaagcctgccagggtgctgctggtccagagagctcactggggctgggcaggaaacattgtggcttttgcaccctggctaattccattgcgcagctttcaatgccactctatttaaatccctgtcagaaagcccttaaggacagccagttttatttactgtcaatgtaaccactcctttggttgatactggcctaaacacctccaggaaagaaagcccgggctcatcaactggacctccatcctgccgaaggaacaaaggaggcttcctcctctccttggcatatgtgcatattaaaaaatttattgaacctattttaatatccttcgactaatgggagagttttaagacctttctaagtatagtagtagtaaatcctgctgcgtatttcacccaaatatccaaaataaaaatacctttgattgagagaggcgagtcgcccactggggcccataccttcagtttcagtagctcagttcaacatcaaaaacaacaacaacaacaacaaaaaccacattgtagcaatcagccctctaataagcctctaactcggtttctaccttatcccaaaggtataggaaatagcactgctttttttaaaatatcaagaaaacatcatttgctctaaaatgtccctaaaagcaggtctaaattgccaataaaggctaggtaattgtatcagcatggatcagaaagcatttctcaggcccgatgaaagagtttgcagggctgaaggactccaaagctgctgcccaatcccccccacgcttagtcaacagcccgcaccagcagttcgaagggagattttcagcacaatgcaatttcccttttaaagccaaacgcctctctactccccccattctcattttgttctaatttgttaaacttaatttcttctgaggagttgtctggaagctcaggtcaaatcagagaaactttctggctgtttgtttttgaaaagcagaacgttctccttcctaagcctctgggtctgaattacttaattattctctccttttcctcctcgtccaggtgaatgatatatgcactgaaaaagcaaactgcatgggtggcttgtcttcttaaccacatcaccagcctcgctctccaccttagagcactataatcacttgactagcaaacacatatacagtataaatatttaagaaaaagtaaattctattaagccactgtgtgatagatgcagtggtaggtacttatctttgaaatattaaactctagacatttatatccatacaaaaaagagtttcctgccatttgatgagaattatgtgcctggcactaataaaatattaaactccaatttaaaagataagtatcttatccacttttttcataataaaacattttacagtgctcaagaaagccaatatgcatcagaatttccatacaatactgtatttacaaactttcataaaagttttgtgtctgcatttatcagtggctggtttcacactagcatcctgatcattctccctaatgatacggtgcatttcaataatgcatgatggaaggtgtacaaacagcgctttgtttttgtgtatggtaattccatatttttggttagtggttctccctggcaattaattaaatggaggtggtcactaagattgcattatcccttttggtccccattatataaattaatgtcaaactgatgcaatgtttcatgtttaaaataacagatacaagtgttaaaaattatagcctgcagttttcctatttgacaatgcattattttcagctgcaaatgtcagtttctaacccctgccaagaatattgtggcgaggcaatgagtaataagtgttagttatcaaatttagtgtcttttgaaatttgcccgtgttgccagggtgggggtggggaagcagtcgatgcacttgtgtaaatttatggaagctccacttccagagccctgtgggaaaggaaaaggattctagcaggcagctagactttccacgacatcagctgcctccagccacagcacgcaggtcctgacggaggcctgcgagggccagccttgggtgtggtcccagtgtctcttggcctggggatagttaagaggtgagaacagctgaaacgtatatgacgttcccaaagggtaaaacattttcaaagggcctcacctaattggacctggactgcataagccccagtcttttcattaaaacctgatgtcaaaagctgcctatttgaaacctcctttgcctcggatgttgcgggaactgggctttggccatggatgggatgttcctgagccctcaagaccattttggtctctgggagtgggattctcccctgacccctggagatcggccttgacaacaggatttctgttagcagcctccttctcttacctctttgttttgatagatgtcaaaagacagttctgccttgaaaaatgtaattactcaagaggatgataggaggtaaaaaactatatgagaggtaagttgcatgatgttttaaaataaacaaatatcaccttgggcacaaatcccctatgcacccccacttaggtttggggttgagaagtggaaggtgcagcccaagtctgcgccagctgactcctgagcagataaaatatttagattgtgtgatacgtgtagagcaagacaaactaaatggttctaacatctagagacactttcatttctcagggcaatgccgggtaccccaaaacagtgttccactggaagagacctttgctctttgtgaaacttggtcaccatcagagaaggggtgggtgggcatgcctgtcccctcctcagaccaactgaagcttggccagaggtgtcctgtgaacatcgcccattccatgccacagagaaaagtactgtcaaattttaacagagagcagaggcgtctctccacagagatttttaaattaataaacaccttgtagccaaagaaatagctgatttgcaggtcttctttctgttgggcatacgtccggatgcagtagatgaaaatatgttttatattatcctgggaatgttatcgtaagtggttgcttttgcaggtgtgagggaccgcggctaacagtgactggtgactgttgtatcgtttggccacagacatcagctaaatcctgaataagaactctttccgtttcttccagaagatgagcagtggtagtgttccttatttctgtaaattactgtagaaacaataggctgcaattatcatcacgtttgaaaagcatccactaattacactcaggataaacggcacttaatacctatgatatctattgtgagcatatcagtgtgatgccctagcctgcactgatacttttatcttctaatatttggaagaaataattgctctgaaaagagtaccttaaaagcttggcctgctgggcttctcttcagcagctgtttcacgggctggggtctgaggggcacgactcagcctggactcctttattctggggcagagaccgcagagttctgcctcggacactcaacactcactacctgtgtgatctcaggtgagtttcctaacctctctgctgtttccttcaacataaaatgcggatgagaataaggctcgctttgtagggttgttaggaggatgaaatgcatcaatacattgaaagcatttaaattgtccttcctgtgtatgatttcaaggttccaaaacttagtcctggaaagttttcctaaagagcttcacacctgtgatccgtgaagctgaaattagaatgttgttctcctggtcttaccaagagacctaaatgaaacaaatcacataaaaaggagcattgaagagtgaatggcatgcaaaaaaagatactgataacaataacaccatatcattgaaagcacagccctaatttatttattatttcatgcccgctgttccctcatctccagcctttgtctaagatgagaccttgggactcatctaaaggcttttatttgacgctttccttgcctctcatctcacacatggaaaaaccctcctaacataactgactattggcagcttaactgaaaccctcccttggttctccattgccacaggctcaagttcaagctcctagtcttcattcttccacccctgactgtctctccagcctcatctctacaaaaaactcctctttctccacatactccagccagatggaaccttttgtagttctttgaatatgccgtggtctccctccattcttccactccacttttcgcagagcattgaatagttacaggcaaggactcaagaagtagactccccgggttcaaacccttgccgaggtcttccagtgagcaccatgggagccccagagccaatcgatttccacttggagctctaagcttggagaagctgtgtgaacttgaataagttgattacctctctgagccttggctttcccatcgataatatgggatatttatctcatacagttgtaatgaagattaattggttaaaatataaaaaatgctaggggcattgggtgactttgttattaagaaagggtaagtcataggcaagtttcaaagatctgtctcctgagatgggggagaggcctctttttttttttttctacatgtggattctaagaggtttaggttcaagccccctctttcccaagaagactctttagttctccatcccacatcaatttatgctttccccaaatcctctctcccactgtgccatgctttagctttgcatgggtcagtatttggtcatgacctagaattatttcagtcttatctctgccagccagtcagatgctggaagaagggagtctcgtcccagctctgccccatgaccagggctgagcacacaatgaacttggccgtggactgattgacacaccaaagtcccgccaagccagccctttgtcccatgggatggcacacacaatggccaactcctccaaggatcctcctcacacttcctagcctagttcacatcatctctgttccctgtgcccaagccagccaggtgcctggccaaataattacataatggggctggagggagatggagacacaagacagccaggggaagggctaaaccccagccctgctgccaaatcctcccattccaggagtccaccttgacatccccagatgatcatgtctcataggatgtcatcctattagcactttaaggaggcagagaagcgtgaagccaaactggtacttgaaatgtccataattgaccttttaaatcactaatgtgtcagataacctggtacgtgattgtagagttgttttggatgctgttctggtcatgttcctttttctaatagaaaaaaaggtggagggaagtatggttctctataatatgactcttagttaagaaaagttacaagaagaagaaaaggaggagagaaggaggagaaaggagaagaaagaaggagcaggaggacaaggagaaggaggaggaggaggaggaagagattaaagaaaaggaaggaaagaaaagaaggaaggaaggaaggagggagggagggaaggaaggaggaaaggaagggaaaggaaaggaaaggaaaggaaagggaaagaaaggaaagttaagttaagttgaggtctcctgcctggctctctgggacccctgtgtggacaaggaagaactgccagctcactgtcctccttctaacttgaagctaatctcatggaaaatacgatgcctcaaatctgaattatttgttctgtgtgtcagggacagggtgggtggcttctgtctgcaatttaaggtaaaattaacgcatatgcttctccagtattttcacagtataagactcccagccaaatgtgagtgtttccacacacttccttcttgagaagacagatttgcatatgcattaaggccattttatcagaatgcacacacagaggaatgacacatctcactgacagcgcccgggtgacagataactccacacaaaacatacatttgaaaggaaaataggaggaggaatagaattaaaggccggtgtgagagtggcatcgtgttttgagtgaggcagcacagattggattgtttgattcacttcccggctctgcgtgagtcaggtggcgacaggtgctcctccaactacctgagctccccgggaaggtggggggtggggggcggatgctgctgggccccgcagccttaatactgcatgacctcatcaccgaggtacacagtgagcctcttccctgtggcagctgaggtctggcccctgaccacctcactatctcacctccctcacctgtaactttgctccggtgctctggccacgtgggcagggcctctggacatgcagattccactgccccaaaagctctttctgcagactgtcctgtgggggcccagagaagctcatgccagttaagctacgaggaaacgcacttgctgggtcctgttagtgccagggcaggtagagggttcaggtggggagtggagactggctggcagtcaggaagcatttctatgctgacatttcagatgaagacatacagaactctcaggagctcctgaatctccaagacccaggaatttcttgtgctctcctcttattctcagtaaatatttactttcatatgaatatttttctttttattttgttaattttttttttatagacaagatctcatgctgtcgcccaggctggagtgcagtggtgtgatcacagctcactgcattcttgaagacccaggctcaagcaatcctcctgcctcagcctcccgagtagctgggactacaggcatgctaccacgactggtgaatttttgtattttattttttgtagagtcagagtttcactatgtttcccaggccggtcttgaactcctggcctcaaacgatcctcccaccccagcctctcaaagtgctgaaattacagatataagccaccatgactggcctataaatatctttctcaaaaggattccacaaatcgtaaaagcctcaggacccacaaatcattgatctgtcttccacaagcttctttctgttaatttcacacaaatattaccttctcctatgggccttttgcaatatcgctcccatctctgtatcactccaccctttaccctggcttgtagaaattaactcttctcaaaattttgttagttcattcattcatccatgcactcatttgagtttttgttcttcatctgttctacatctagactctccatgaccacaggcacctgctctgttcactcacctgcatatctctgcatctagaacagctcagggtaggtgtggagtgaatggtgattgcatgagcgaatggctgccaagtctacccatggcttgcccatcctctggatacatcatctacttctctggaactgcaagctttctcatgaaatacgaacggctaccctagatgtattaagttgctcaacccatgtcttctatgcctcacaaactgggctgggtccaggggtctagcaaagaacaagacagatgtagcctctgtcttaatggatagtgcagtttgtgaaagacagacattgaacagaaaatcacacaatcattcagtgaaagttgagatgggatcattggaaggcttatgtgagagagcagcagcatctctctgtctgctgagacacaagcaaatgcttccaaagctctgtccacatctagcatgcatttctggtgctgctcatcaaccaccaatgagaggctgggttgtgccatggtgtctagaagcaccatgtcctttggtgttcctgaggctttcagcctctctcttccctgaaagctggcatggggaggaagggattttctgccacccctttaccactccccaacatacatatctctaagtctaagggtccctggagcccccaaatcctgacagccatgttaccaaatgaggcacttcttctctcacttgccagctgagtgactgcttctggtgattaagaagagtaggagtgaacagcagagggtgtggccgatgtggagtaaacttacttgatagaaaccaacttggatagggtcttcgcattctaagcatttgggaaattcaagttgaaaacttaaacataggcaacatctaaaccagggttgtccaatcttttggcttccctcagccacattggaagaagaagaattgtgttggtccacacataaaatacactaatgctaacggctgctgatgagctttaaacaaatttgcaaaaaaaaaatctcataatattttaggaaagtttacgaatttgtgttgggtggcattcaaaaccatcctgggccacgggttcatctaaaccttccctttttattagatttctgtatgatacatgtagataaccaatttgcatttgtttttttccaaagcactgaatgagctgttctggctgtcttctgttttataagtctgtgcacctgagttccttgggaaccctcttgcagagtttcaccacctttattccttcaaagccaccaatgccctgaagagcagcagctcagccacctgggccaggtccgtgtgctgatgaaggtggtggctggagtgtgatacccataataaaccctcagccaacctttgccggatgctgagatgctgctgttagttgtgcatgcacctgctaggcccactcatgtactgtccccaagtcactactgtagagcaaacaatgcaacttgtgtgttggggattgacctcagcaaattataagcaattaaccaaatttgccctaccattaatcatattattctgcattgccgattcatatgaccccaaaattgccaactcttttcagctgttagagatgtatatccaggaacaaatgactgccttcaattctgtctccatcctgttcttcgagtcagcacccagctgaggcacgtggctaacagtgggagaacaagaattaccatagatctgccaaggatcctttgagagaggacaaaatagctgaatgcaattaagcctattgtcagtggctaaggtacttggaatgacaggtgtctttgaagtgcaaggtattagcgctgtttgttgctaaattcccaacctagaactctatcattttgctaagaaattgcagcaaactcaatttttttctatcaagtgtttccctgggtgctaagtctatcactgttataatatattaattttttttcctttggtgacattgatgatggggtacgtcttcactctctctcacctggtaccttctccgtgtctttaggagagaatttggaattgctggaatattcttggccatccttcatttggaatttatgtggtaatttcagtgaaaccgagaccttgtgcagcagttttcatctttttcaaggctgcctctctttctcgagaagctggagagtttccaattattccttctggtctctttggatgtgaattgtaacagatcagctgagagtcgcagttcaacattgttaagcttatcaatataaatataatgttaaaccccttttagataattggagctatgtgtgaaaatgtgaccaatttgtgcataaattggtcctacacttcttcctggcaaagacagagagagagggaaagagagaccaaccatatgtgaagttggtttgcttcttctcggggactttccacaccttgaattcttgatctggctttgtggctgctgacagttggaaacctgcacaggttatgccaaaaccataaggtcctttgcccttttgaaccaaattcttctgtcttagaggctgcacggcgagtatcaacaaggcacttgcatatcacaccaatgggagggttgcagacagtcttgagaattaaacgtctctgcttggacaattaccaaattcaaagaaccaaatggagagactgacgcccatggagggggaagggaggggtgccgagggaaatcctggaactaactcatcccgcttggaaaccttgctgtcacttcgggatcctggaaaagctcatattctcctcctggcttctccttactgtgtgtgtttggggtggggaggagggtaggatggagggtgcgctagttcatttttccaggcgtaagtcctccagagagagttaggaggcctgagataattattctaaaactgcccacagcattttacagcttaaggcgagtgtttaacaaaatcagttcctcccaacaatactgagctaaatattattatacaatctctaccgataaggaagttgaggttctcagaagattaaaactaaaaacaaaaagaaacaaagaaggctattcaaggatacttggaaccgcttctgaagttcactctggagtttgtaaatttttacgcagtgcgtttccttacctgtaacaaagctgaaatgagaccataattaaggaagaaagtcgctgaggcgctgcagcctgtgacgtcatcaagcaggcttctggctggcctgaacgtggaggtggcaccgtgtttccatgaattgccagcccaagatgtccctggggctggaggcattcagtcaggagcaaaggctccacccctcatctgtttactgctagactgcctttcaggatgcagaatgcaagactcacccagatattacagaggcctgggggaaagacagacaggacctctccagcaactgctgtctcagataccgaaaggctctacgaggccatggtcttcgcgcagaaccaagctttgcaagaaagcagaattctcatttcctttactccggctcacccagaaaacagagtctacctgcaagccctccaggtttgacctctgactttagggatgctcagggtgggaggacatatgacagcctccccaaatccaaaagatgccctagctgggtaccatggctgacacctgtgatcccagcactttgggaggcagaggcaggaggactgcttgaacctagaagtttgagaccaacctgggcaacatggtgagacttcatttctactaaaaatacaaaaaaaagtaatcaggcattatggcatgcacctgtagtcccagctacttcagaggctgaggtgggagtatagcttgagcacaggaggttgaggctgcagtggtcatgccactgcactccagcttgagcatggaagtgacagcttgcctcaaaaaaaaaaaaaaaaaaaaaaggtgccccacgatctcatcttttgccctggaaagagagatgctttctgggaaaaatcaaagatatctgtttaaactcatggttatatttccaaatggaccccaggatgtaatgatcacatgtattttctcgactcttcaccttttccctctaacttggggaaaagtaagtgcataaaggggtttcttgggcatcacttgctctgttaaagcagcatgatgagttaagcagacatgaatcagaaaacatatggacccaattttggtttaaaaattaataggaaaacacattctcatcaaactcaaaacaatgaaaaatattttttaaggaggcaaaaaatccaaaatacagctgggtttgcccactccacacagattcttaacacccatggtctccttccttggttttcaaaaatagcaaattgtgctgaaggttgtgtggaaccaattaggacagcataagtgaggtgtgggcttccagcaggatggaccacccagtgcaggggccttacaaggcattgctggtggttgatgctgtatctctagacctggtggagcagacaatcagggcaagtccccaggatagaagagatatccacacagtgccagagtgaagaagtcacagatgtgtgtgtgacaggtaagctagattcacctactgaccaacaagctcacaagatggaaaaggtaaaccaaacccaagcgaggttcatcttctgtcaaccattagatgtgaccttaccctaggggaaggacagtttattcttcaggcatcattcccagcctgtcctccctttgataaaattctcttctctctttcccacagccctccagccatggattctcaacatcccagttgctttgagctgccccctgggatggctcctctgaaccaaagctgttccctggtgccccagcatgtcctgccagagcctctaggatgaaggagtttgttggcagaagtgacaggtgatgggagggaaaatcagaaatgtcaccctccatgggtatccagccagccagactggagcctctaaatggctccagctctttctagattttcctggttgatgactcttggagtccatcctcctggaagccctgagccaccttctcaccttgcccttccttctcaggagatgatcttggtttttactttaaggactaaacaaaagccatccgttgaacccattgtcaccatacccaccacgcttcccatatctaaatccatcgttttgtctctcctgccatgcgcctccccctgtgcaaagcgaatccctccagctttgcactgggttccactcttgtttcctcctctgggaccctgataactttcatcatttgctcatagactgctcatttccatgtaaggcattttcagcatggtgcttaaacgcacgctctggaagccagactgtctgtcattgtatggaaggcttgggggaaaacccagcttccctgcgcctggtgtccccatctgggaaatggagataataataattcccatctaatgggcttgttttgaatatgaaaaggttaatacatataaaacacttatacaagtggctagcacatcataagcatgaaataagtataggttatcttattatccctgcttccttcatgccaacatttaaatgtgatcatctctcatatttaagaaggaattctttctcaactcacatctacagccaactgctgtcctctctaaaaattcacccttgctattgattttcttgggtgagacaactgtgtgcgcctgttgcttttccctcctaatttctccctccttagtctagggtggtccagctccagtccgtccattcttgaaactgcttgcacgatgaacttcctgccactaaatccaaggaacacgtttcactcctgtctcttcacctctatgcacccttggctctggtgacctttttgctctcttccaatactactctgtgggctctcacaccctaccctgggcagttcctccttggcttcttttgctgtgcagattgataatgtaaatgcagatgtttttaagagtctgacctcacctattccctggttgttggcctgtggtaactctttccagccagccttctctcctgagccccgttggaagtggaccctcagatgtctcataggctcccatatgaagccctcccctttatccccaagctgttcctctgggagtttctatgtcagtggagagtatcaactcgcatcccatagtccaaaccaatggtgtaggggtcattcttcaacttttcctttactctacgttgattctatttcctaaatacctatcaggcccctcagcatctctccagctccacagccattacaccaacctggactactactctccctccctaggtcactaggatcacccttcacgtgttctctggcctcgcaccagtctcccctctgatgcatgccctgcactgccccagggagatctccatcgaaagttcactaaaggtttcccattgccctgatgataagcaccaaattccttaacttgcttttcaaagatctcgaaaccacttttgcaagaattatgacagggagaaaagtttaacctaactgactccatcttgcttctgacctcccaagttaactgtctttgctcattcctggacacaggccaagcaaactgtgggaggaattagcttataatttctctttgaaacaaggatgatcatagtccctccctaaattgaccccctccggggactgaaactgcctttgtaagactaatgaaaggccacaagtttaggattatgggtgtgggtgcctgaattctgctaaactataggtccagtgaaagaataaccagccattgttccagaagtcgcaagatttggaacttccccagtcactcctgtggataatatcactattgtcaaaacataagattggtctctgagatatttttcagacttttgtgttctggtgactgactgactccacctggacccatgactcacagcaaagagcttattcctacccagaaactcccacctagaaagtaacacagtgcattgaagtctgtttgaacacccctgtgatttcatccccaaccaatcagcagcacccgttccctagccccctggccaacataattatccttaaaaactctagcctccaagctctcaaggtgacagttttgagaaatgcctcctgtccttctgttcagctggccctggcattaataagctatttctctactgtaacaccacggcctcggtgaattggttttatttgtgcagtgggcaagaagaaacttatcgggcaattacagtcttgacttactggcatctggtctcattgccaatggaagttctccatttcatcttttatagtctgtgtttcagccacatgggttttagtggacttttgtcatgtattggttgcctagcatctgaatactttattttgatttggggaaattctcctgtgtgaatttacaccaaaagggctttagatacaccctctccccctcactggcaactagcatgtgatcatgtgactcagacatggccagttaggtggacaatgatggcagtgccccgccagtatcataatgaaccttgactgggttcttggcagcccaacttcctttggctactgcttgattcctcagtcgtcctgtccttttataagctacttaatattcttccaacaaattccttttcctctgaagttaaccagagtcagggtctagtacttgtattcaagaactctgacactgacataaatttttttgcaagccctctaacgtacaaggcatgtgtgatgctatctgtacacacttcacttagtttattcctaccaattcttcagacctggatttaagatttcttcttcatctgaaacctcacccatccctgcctcatttagaccagatttggtgtccttgtgaatgctttctgtagcactgggtttctctctgtcatagcactcatcatcctaaaatgtaattgcttattaagttgtctccactactagaagcaaggtgctcaaggaccccacttgttttgcctattcttatattcccagaacccagcatagcatctgtcacatagtagctctcactaaatatttgctaaatgactgaatgcattgcagcctcatcccagtgcccaaagttgtgactggaccctcctttaaattcaaatatctttagagatcttcagctcccaacatcctactgtgaattactttccaattcatctccaagccccacctcctagctctctttacccactctcttagaagtccactgccatggccacactcacagacctggattctgtccttggagaagcagatctgtgatgtgccattttgtggtagttatgcatgagatgctacagaggcacttgaccgagaaacaagctagagggaaacatcctgccagaggctttggaaggagaagtgctgtgtagggatggtaggagtgaaaaaacagaaaaagaacaaggatgagaaggtgtcagtctcccccactagaatgccagttccatgtgaactgagtccctttttatcattgctgtatccccaagtctagagcagagcttagtgcatggcaggtactcaatatgtatttgttgattgattgattgattaactgattgaatgcatattacctacagtgaagcaacataaaatacacatgcaaatatcttgatatttccagcatgagggattcaggaaacattccatagagcaaaacatgcatacagctctgctcattatcactgattgaagatggacaaagtgtaatggtcatgcctttatttagataacaccagaaatacttagtatgaacactttcacagtgtcatttaaacacatggtcttctaactctcctttcctcacactatcttaattcattgcccttgcagtttcccaatttggagtttctgtttcagaagcgtgtccccctggggaagcatacaatcctgtcctcctccaccttcatccctggcccctctccacataacagtgtctgatattccttccagcccattctttatacattgccttcccagctgctccaccccactcctactagaaggcctcattcaagtctgacctgctctgagaagcctctcttcatcaactcggtcctcatctcctgcccttttctgaacacttacaggacctggttctatattgactacttctgctctgtagttgtgtcatttatgagttaaatctgtcagagataaaattaagtctgagacaaaactcacagcctgtttattcataaatacatagtaaggaaacccatcagctgtcacttttgtggacaagtgttcaggggtgttaaaggagagttcttacacagcgtaaaaagaggaaatacagagacagtctctgattcgcaaatattatgcttaggtggaattttggaagctggagagactttctaattggtcttcaggtacatttggccatccttggttggcggtaatttggggagatttcaagaaaagaagggttgttcaacattggggtgggggtttcctgtggctggtcatttcctggaactggtgggtggggtactcgccgccgcggccagcagtctctcaagtctgatactgtagctcatgggctgccatgagggagaaatcacgtctcacacgttgcttgtatgtgcttcccgtcttggcgtacagccaacgttcagtcctatttccagatttaacatgaggacttgttgaatcggctttggagaaggaaaggtaactgtacagatacatgcacacccactgtgtgtgcgtgtgtgtatactccactagaaaatgaataattgatataggaaagggacatgaattgatatgtactttacatactgctctcagcatctccatcaaataaatccatcatatctgagtcaaaactcatagtctaattcataaacatgaactcatcagccatcacttctgtggaggagggtttgacaatattacagagtaaaaagaggaagtcatgactatatgtgcccagtgtctggctggttttgaggtgactgggaaagctacaatcaggctgatgatgtctacagaggaccatgctgcaagccccatcccatgagaagaaactgagctgcactagctgagtttctaaatgagccagtgagtatctatcaggactgggatgccctgggagaggtaggagtcacctgaaagtttggaataaccaggaacaatgcataggaagggaatattgctgcagcgctgcctatgcggatgaaaatggaaatttcacaatggcgtcatagagcccaatgtgctatcactccattggaaacactaatgtgaaacagaagtcagggggtagaacccacagagaataaaaaaccttttgggaaaatagatgctcaagaaacatttattgatgaacaaaaattcttatcagtgagcaccagatcactgcctcccagcactgatgatgccattttgcattttggccacattgtggatgtgggggctggtgacagcacagtggtgaccagtgaggaatggcatctggtcactccaatggcccagccaagtgagatactcgggagctggggtgttgggagtcaaggcaacacttaacatagccaaactattctgcactttagtgaccaagtactcgggggtgggagaagagcaccccgagggtagatggcattgaatgtggctgcgtctgcaaatgaacccatgtgcagcacaaaatctctccagtagctggctgtgactttgcatctccccgtggcgttttttttttttgccttctcaaaattaaatgacagagtcattttgcacttggagtttccacagtataaatgcaatggtcagccttttgataaatagactttgaaatgctctacatatgcctaccacaagcttttatccatttggctaattttattctttgtaagccacagaagacggggaaaatggccctgtgattagatctagctcagagactggggaagagaagtggaatttgagtcgtcctgaaaagcctgagtaaagcatcctttgtaagaaaggtggaatcagagcatcaaagaatcttggggctgcgaaggaccttcgggttccgcaagccctatgactcccaacgctaaccctccagcctgggtgtgtgcttttttcaaagagctccctgggttggctttgggtaggtggctgtataacaaaacagccttggcgttacgacactgggttcaaaactatgtgtttctaccactgttctgtgcttccgtttgcttttcttacaaaaggagggaacgtagtatctatctcatagggttcttgtaaatagtacacatgatcacccctgtagggtttttagaacaggatttagcataatatgtcaatcatgatgaagatcaagacgaggaagaagggctaagttggcaaaccactgattcaacctagctgctgacacagcccagaagtggtgttttggtgtcctgaaggtgtcatgctctgcattcctgctgtggacagcctggctgttagagtgtatcctgatctgatcctatctatagctctgcctctggagacggttgccagcaagcctgggtccttgctgtcctgaaagctgttgcagaaggcctgggctatgctgggtttgactcaggatcttgcaggctcactatttccctaagagcaggagctcagacagtaagtccccatggagggcaggttcttacgggtaaaacctcagagcagaacatttgcagggtcctctgctgttaacatgcagggattcctccctatcctggtgtcttaggtcagatttcctcaccacctccagagccctcaactcagcatgtcccatgagctaatgagaatgaaccctgtattagtccattttcacactgctgataaaggcatacccgagactgggtaattgataaagaaaaagagctttaagggactcacagttccacatggctggggaggcctcacaatcatggcagaagaggaaaggcacatcttatatggcagcaggcaaagagagaatgagaaccaagtgaaagggcaaaccccttatagaaccatcagatctcgtgagacttattcactaccatgagaacagtatgggggaaaccgcccccgtgatataattatctcccactgggtccctcccacaacacatgggaactgtgggagctacaattcaagatgagatttgggtggggagagagccaaactatatcaaacctctgctgtgggatgttaggaaatgcctatcaggctgtgtgatttttgtcccacagtgtacacattttctggagaatcacaggacatgaaaacaaatatgatttcattacatgaacctttccagtgtttgaccaaatattaagcttatcaggccaatttaactgacagttatagcatacttcctgaatccaagacacagagccaggcaccaagcaggaagaaggtggtgatatggccaacagaacagaaaatcagaagccctgtagtggtggtgccacggaaacagtggaaggtgaagtttctgcatgggtcaggcatacattggtgaggcacattcgaggccagcctcatggatatgtcacctgtgtagtcccgcaggtctgtcactaggaccccccgacctggcttattgtcctattgttgccattttgaaattcttttttttttttgagacggagtcttgctctgtcacccaggctggagtgcagtggcacgatcttgattcattgcaacctctgcctcccgatgttcaagagattctcctgcctcagcctcccaagtagcctggaactataggtgcccaccaccacacctgcctaatttttgtatttttagtagaaaccaggtttcaccatgttgcccaggctggtctcgaactcccaacctcaggtgatccgcctgcctcggcctcccagagtgctgggattacaggcttgagtcactgcacctgtctgaaattcttaatcatctttgaacaaaggtttctgcagtttcattttgtagtgggccctgcaaatttgtagctgttctggatttaattgtaaatgtccatggcctgctgacacccactgtgtactgtacctcttcttcctcctcccaactgcccaaaacattggattgtctctgagttaaggacaccagactaacccacaatctctgctcccagaccctggttgtcaaaagctatgtcatttttctgtacttgccctaaagttgcacaggaaaagccccatgtcccaatgtgtgcacacacccctcaaagatgaggtgtcccttgctgcagttcataccttggctagaagagtcagcgttttgtgtccttggctaccctgagaggcttaagaagctttgctctattattttggagaaaaaaatcaggatgagtgagctgcctgccccgggccacagctccccaaagtctggctcaggctggctgctgaggtgcagcattgaggagcccgtttatgattttgatcactgctcatcacaaatgtccacaaccagacttctctttgctcgtaggcagtagacaaagcaatcatgcacattttatggaggaggacgctgaggctctgaaaacaagtacttgtttgcacttcctggtgctttgcttggctgaagtttgagataaagaacgggaaatcccacccacagactgtcagggttgtcatttcaatgccattctcaggtagagaactgagctagcacatccacctttggaagaaatcgccccctgagtttaaggagaagcctgcacattgcaggggctggcagaggggagcagtgctgggaaagactggaaaggcttagcttcttgccaggaatttccattggaacatgcctcgtgcagactctggaaagacaaactggttcttaaaatatcttcaggtctggatggctgggctcgccaatccttccctccatgtggcagctccttcttgactagcatgctctctgtggttcttagatcattaacagagaaaaccagccaccactggggactgtagaaggtggataaagaatattccattgtcatagagctttacagggattctggaaatgacagcccaggataactccctcattgtatagataggcaggctgcagcctagagagaaggaaggggctcttactcccatcgacctcttcaaaactccgttactcccagattgttcatgctctgatggccgtggcggattgaagcctggtttccaaccaagtgccttgtggtttgaactaggggcatgcacttacctcagtgggactaccacagtctttctcctcacactgtaaaatctggactcaactctgattgactggtggaggccctggagctttgagatcatatagagtgtggtccaaccttcttccatcccatggatgttacaggaggtaaaacccactaatgaagggaatggatggaagccaaaaggaaaacaacccagtcagttgcagaaaggcagtgagcgagagtcctcttggttccttctgcttctaaggacctcattccacctaatgatttcacttgtgggtcatcctcaggctgctgtgggcacaggttgcacggcacaatctggggatcctttgggttctggcagcctcagctggcagcccctccaattctgttttgtattgccctgacacagatgcagaatgtacatcctttcttcagtttccacaactagtcacttagaacattctgtgcactgacttccctaaagtgtctttggagagttaatatgaatgtcctcatgtcaacacaatggacaaagcgaatatggacaaagcattcacttttaataccctcgtccctaaaagagatgtggccacttccataagtacaccacccccaccatctccttgcccagctgtggctctcctgccacttccgagggtctgatgatggagagggtggcagttgaggtaccttccatggctgtcctctctctcaactcctctgctcctcaatcttaccctacacgctgagttttatggaagaactttgatccaatggcagtggtctttggagggggatttattaggcaggggttgctgaagctgttctgaaccaaagctcaggcatcctgccatagcagactcgatacctggcaatatcaagtaggttggtattttacccatttaaatgtacagttttgtgattttttatatgtgtatacagtcatgcaattgccacaacaatgaagacatttaaaacttccatcattccaaaaattcccttgggtagttctgcagtcaatacaaccctcacccctagccctggagaaccactgatctattttctgttgctatagaattgtacataaatgaaatctgacagcatgtaatattttctgttggatttctttcacttagcataatgcttttgcaggttcattcatgttgtaacatgtatcggtgctttttccttttttatttattgctatatattattccataagatagttataccacaatttatttattcactcacacgctaatggacagccaggttgtttccagggtctggctattataaagaaagctagaaaagacttttgtgtacaggtctttgcacaagcatatgttatcatttctctcaggtaaataaatatctaggagtaggattgctgatcacaaggtacatgcattttcaatcttataagaaattgccaaattgtcttccgagtggctgtgccattttgcattcttatcctcaacatgtgagagtgacagttttcccacatcttcatcaacacttaagattgtcagtctttgtaatgttagctgttttagtgagtgtatagtggtatctccttatgttttatttagtgagaactacatatagtttattgcacttggtggtttataatataccacaaagatatataacatataaaaggttttgacgattgtctaagttttttcttacaaaaactaataatttttatgtttttttattttgacacaaaatagttgtacatatttatgggatacaacatgatgtttcaattcatgtataccttgtgcaatgatcaaatcatggaaattagcatatctagcacttcaaacattcatcatttgtagtcagaacactcaaaatcctctcttctattttgaaatattctatttatttatttttttaatttttttactattataatttaagttttagggtacatgtgcacaacgtgcaggtttgttacatatgtatacacgtgccatgttggtgtgctgcacctattaactcgtcatttagctttaggtatagtcacagtgctgtgcagtaagacaccagaacctattttttatatctaattgtgacttttacctattgactaatctcccaccattctccttccccgactctccttagaccctggtaaccactgtcctagtcattaagaagtatgaggacgtctttttaagttccacatagggatgagatcatgtactatttgtcttttggtgcctggtttacttcacttaacatgatgtcttccaggttcatccatgttgtcctaaatgacaggatttcatttttttttaatggctgaatggtatttcattgtgtgtatacaccacattttctttaatcatttttccactgatatttagtttttttctaaattaattaattattttttatttcaataggtttttggggagcatgtggtgtttggttacgtgaataagttattcagtggtgatttctgagattttggcgcaccgatcacataagcattgtgcaccatatccgatgtgtattcttttattcctcatctcctttccaccctttcattatatcacccttatgcctttgcatcctcataagtgctcccacttatgagtgagaatgtacaatgtttggttttccatttctgagttacttcacttagaataatggtcttcaattccatccagattgctagaaatgccattattttgttcctttctatgactgagtagtattccatggtgtatatatatactacattttctttatccgttagttgattgatgagcatttgggctggttccatattattgcaattgtgaattgattgatgggctcttagtttgatcgcatattttggctactgtgaatagtgctgcaataaacatgggagtacgaatatctcctcaacatacttattttatttcctttggatgtatacccagtagtgggatttctagatcatatggtagttgtatttttaattttttaaggaaccacccattgtggttttgatttgcgtttccctaaatgttagttacgttgagcattttttcatatacctgttggctatctgtatgtcttcttttgagaaatgtgtattaaggtctttgcccattttaaatcagattttttttgtttgtttttctattgagttgtttgagttccttacatattctgaatattaacctcttgtcagatgaactgtttgaaaatatttttttctcattctataggctgtctcgttattctgttgattgtttcttttgtgtagaaaaattttggtttgatctaatcctatttgtttatttttccttttgttgtctgtgcttttggagtcatattcaaaatattcttacccagtccaatgtcatgaagtttttcccgtatgttttcttctagtagcttcatagtttgggggcttacattaacccattttgagttgattttctatttgctgaaagataagggtccaatttccctcttctgtatgtgaatatccaattttcccagtacctcttatttaagaaattgtcctttatccactgtatgttctagacatctttgtggaaaatcagttgaccataaatgtataggttttgttcctggggtctttattttgttctattggtctgtgtctgtttttgtgctggtactgtactgttttgattactatgggtttgtagtacattttaaagtcagatactataatgcctccagatttgttctttttgctcacattgctttgggtatttttaatctttcatcttttatttttattttattttgtctctttcaaattttttatttacttatttttaaattttatatttaaattattattttattaaatttttatttgttattttatatttatttttatcttttgtgattctatataaattttaggattattttttctgtttctgtgaaaaatgtcattggaattttgataggaattgcattgaatttatagatcactttgggaagtatggacattttaacaacactgatttatccaactcataaatatgagatatctttccatttatttgtatctctttcaattttttctcatcaacattttatggatttcagtgtacaggtctttcatctcagtttcaggatacaaaatcaacatacaaaaatcagtaacatttttaaatgctaatagtgaactatttgaaaaaaaatcaagaaaacaatattttttacaatagctactaaaaaagtaagatatgtaggaataaatgtaaccaagaaagtgaaagatctctacactgaaagctacaaaacatttattacaaaaaattaacatttatttaaaaaattgaagaagagacaaaaaaatggaaagatatcatatatttatagattggaagacttaatattgttaaaatgtccatactatcaaaaagtgatctacagattcagtgcaatctctatcgaaatattaacactattcttcacagaaatagaaaagtcatcttaaaatttgtatggaaccacaaagacgctgaatagccaaagcaatcttgagtaaaaataaacaaagctgagggcatcacactatctgacttcaaaatatattgcaaagctatagtaaccaaaacagcaagacactggcataacaacagacatatagatcagggaaacagaataaagagctaaggacaaaatccacatagttatagtcaattgattttccacaaaggtgccaaaaacactccatgagggaaagaacagtctctgcattgtgattttagcttgcacttcctgaagggttaacaatattgaatctctttcgatatgcttatttgccttacttaaattattttggttgaagtatatgttgaaatcttgtctatcttttagaaggttttttttttattaataggttgtgcaagttctttattcttgccttttgattttctcaatgatcttttaattagaaaaagctttaaattttgatgaagcctgttttattatattttctttcttttatggcttatgccttttgtgtgctgtctgagaaatctagctcgaggtcacacaaattttctcctttttttttctagaagctttatggttttagctcttatatttaggtttatgattcattttgaattgcttttgtgtatggtatcaggaaaaggtgaaggtgatttttttcccaatagttatctagttattccagcattattaattgaaaagactcttatttcccccattgaattaccctggcacctttgccctggtatctaacctttacttgaaagttggttgaagcaatcacaaaagaccgctttactcaaggtagaaggacagctgaagaggagaaacgggacttcccttctgaagtggagacagtgtctaagactcgggcctccgttcacaaactgtcaggaatgattttgctaacaatgcagctttccatagcttgatatcatcctttaatatagcacaaatgtttttgcctttccccctccttctggggagccctcgatgccatagttagaagttgaagtaactctcaggaaaccaggtaggagaatttagaatctttagatatcaaagctagaaggaaccaataacctaataaagcacacactcttcatttgcaaaaaaagcaggaaagaggcccagaaaggttaagtgacttttccagcatcacacagcaatgaaatggcagagataggagcagattccaggtctcccaactgctccctgctgtctgacactcatcttccccacaatagcctccctcctagtgatttctctgaagatgagtggttcaccatgtattggaacttcacaaaatcatctgcaggaggcgtggcctcaagtggagcttgacgtagccctggctgtggaaagcaaggaggcaggaggctttagttagttagcagcaccaactcctcgccatagtggtcatctgaaatggctcagttgccttctaattgctcccaaactgttgcacatgccaggctttgggtgtttcacatcatccaggtttccccagcccaggacccttgctcattcatgtggctgctccatggccacaatctgttgcagacagaatgcatagcaggcatgcatgcatcacagcagtggtgggtatgtgttctgtccctgtcatgtttcttcagagtctgcagagcaagtgcaaggccaggctggaggagccacccaggatggcagccacccgctgaggtggtgcattggctgagatctcagcacgggaaacatcagccctgacagtgacatcacagatccttgtgttcaattcccttctttgcagatgggaaaactgagtcctagagaagataggctatgttcccaatgtcatacagcagagttgcatagcaagcactttgacagagagaaattcaactctgtacaccattgattctttgcttctgtttgatgagacttaaaatgaaaattatattttgtatttgcactccttattatatacttcacaattgcattggcatttatgcatccaaattactggatggtgttatctacataaatccatgtatactgtgctttatgaatgttttatagtacatgcagccaaaataacccttgaaatgtgattttcatcttacccagtgtcttagaacctcgttccctctgaaagatgtggctttaatgtggagctatttaattgggcggggaagaggggatcctgactcctagttaagcactctttccccagcaccaagctgccttgatcttccagtgaaatgtccaatttttgtcggaggttccccctccccaagacaaaaaaggggagtgcaggatggtggttttgccaggaagttagcgatgagggaaaatgcaagtagcaaatgtccatgaaatggagtttctcaccatctcaacaataagggtttaatttgcaaagtgccccccgacccccactactttccagtcagctacagcaaggcttcctggggctgagagcagcctgaaccctgtccctttaatgtggggtcctcctctgggctcttcctctctctgggaagtgactgtgcacagggaaagtgtaattggcaggctgtgacactgctgtctgcaagtgtctctctaagtggaacgcatttcagctttatctggtgatgtctgctacctgagaagggccctgggccatctcaaagggcttgtagcagctaattgtgcctgttaggaccagcaattagctggggatctctggacttcgaagctccaacacccaccagctttcccttcctttctctccctttcacttaactagcccagcctaatagaggcagtgaaggacaggcaggtgaggggcagacaggacaaggaaggtggaggctggcagggcctcatcctatgcccctctgagtcctgcactccacccctgctcaagagaacctgcgaaaagaaacaggcaccagctctgctctcatgctgtaaatacatcctctttattgcaggaccagggctagaagcttattaatcggtatcgggagtcatgctgcccgtttgtacagtttaagcgggagttggaagatgacaataaaaagctaattaggcgcaggtcataaaggagatcacacatgcatggtgtctgctggttactatgggcacacgatggtttcggtggaaacacgaggcagaacgtctgaaaattaagacaataaatcagtttcattgaataaaagccatgcatttacccattaattaaggataatggtatcctataagctttttgtgtaccacaggtaatttgttgtactttgccgtaataatatacgttgaagattaaaaattcagtataccttacaagtaatggatgcacacagctcttcctctgttctcagaagcagctaaaggttcatgcattagcacaatcccatattcaggctcacctgatctgcctttgtccagtgactcagactaattattaggcatgttctttctctggtggcttgcagtgagaggggagtgaccctccgtcccactgtgtctgctaatgtgccatttgggttttattttttagcagctatcacccatctcctttcttcacaaaactgtacccttatatttttgggggggatttcccccaagttttgcagtcttgaagggctgtcaatcaaggtgcccaaggcaggatgtaatcagagctcagccagtcaagctctgtgtcccaggactcagacgcaagcagagtaatgtaagggcagaggaaaacaaggtcctgggagctctatttaggatagagctgatcaacccagttgacaggatgatcaactaggttctgcctaggagatctctaagattcccaacagtcactcttcagggtaggcagaagaatgccctggggattaggaagacacccacttcctaatccccagaacctgtgaaaatggtacccgacatggaaaaagcaacttcacagttgtgattaaatgtgctgactttgagatgggtagataatactgggttttccaggaggaactcatgtaatcacgagtccttaaaaatggggaaccttggccagacgtggtggcttacgcctgcaatcccagcactttgggaggctgaggtgagaggatcgcttgaggccaggagatcaagaccagcctgggcaacctagtgagacaccgtctctacaaaaataaataaataaataaataaataaataaataaataaataaatagatagataaataaataattagttgggtgtggtagcacatgcctgtagtcccagctacttggtaggctgaggtgggagaatagcttgggcccaggaggtcaaggctgtagtgagccatgattgcaccactgcgctccagcctgggcaacagagtgagaccctaagaaataaaaaagaaagaaaagataaaaggcaaagaaaagaaaagaaggaaggaaggagaaggaaagaaggaaagagagaaagagaaagagaaaggaaaggaaaagaaaggacaggaaaggagaaaggaaaggaaaggaaaggaaaggaaaggaaaggaaaggaaaggaaaggaaaggaaaggaaggaaagggggagggagggaagggagggagggagggagaaagggaggaaggaaggaaggaaagaaggaaggaatcctttttcagctgagtcagagaaaaagatgacaataggagaagagtcagagtcgggatatgagaaggacttgaccaccatgactgaccatttttgaagatggaggaagatgaccaccaaccacaggatgcgagcagccactaggagctgaaaaaggcaatgagatgcattatccactggaacccacagggaggagagcagcgctgctgacactgcgatggtagcccaacgacacctgtgccagacttctgatctatgaaactgtaagatgatagatttctattgtttgagccattcactttgaggaatttgttacagcagcaagagaacgttcacactgttgaggctctgccctcagacttagccagattgtgtgtctgctgcttgtaaccagctctacctatcagaactggagaaagcaactttgccttctgttacctcaagtaaatttggatgggccataggtataattcacagctcagggtaggctggctggcctggcaatgaaacagagctggaaatgaaaggtgctgcctattctgtcttcccatgtttccagtgccaaaccacaccccaaaacatccacggacacgttgatgtgggaaagacctcttggtctccccttccctctctccttcctctctctcttcctcttccctcttccctcttcttttttgctctcttcatttttactctttcattttcagaacatgaatgcctggatctcccaaccattgccacaccaaaactccattcactggttctgggaaggcacatggatgtatgatttttataaaataagctcacctaagaattctgatgcacatgagattcaggtgcctgggaagggccaatggcctaatttaaagccaatatttccagataacataatgaagacttagaggatgtaagtgtcctgcccaaggtcacacagctggccagatgcagagaacaccaggttcagtgctctttccatgaccaggggctgctgccaactcgaggacattagagaattcagtgaccctctgacatctctcagtttagaaacctttctcttttaattggagcatttcatccatttacattttaatgtaattatgttatgttggggctttaatctaccatcctcccaggtgcatttgattcgtcttcttacccactcagtgccccttttagttttggggggttggttatttctttagttattccagtgtttcttctgtccttcagaagatatacactcagttactcttttctgcttaccttagtgccatggttgtccactggggcaatttcagcagatgtttgacaatgtctacagacagttttggatgtcaccatggcagtgggtggaggggagggtgttgctagtggtgactagtaactggaggccagaaatgctgctagacttcctatagtacacaggaaagtcccttccaataaggagtgtatggccccaaatctcaacagcactgaggctgagaaactctgccctagagatgacaacttttatctttgactcatgaaaatttaatgtcaatttggtaactttacaagtttcccagaaagtgtaatagaatactgcaactcctttgcccaatttcaactcatgtgctatcagtgttgggcattctccatatattttaaaccccacaagatattattgttatttttgatatagtcagttcttcatttagactttcccagagctctgcatttcttcctggatctctgaccttccatatggaatccttttccttctgcctaaagaactccctttatctcctggagtgttgatctatctgctggtaagaagttctttcagttttcgtttgtctgaaaatgtcttcattgaacttttttgttgtctttatgattactagtatgtttattgatggctacatgtagaaaacaccacggccttcacaatgaaattgttctgcacaaccacaatactattatcacacttaagaaaattaaaattgattaaataatatctaaaatagagtgaatattcaaatttccacacttgtccctgatacattatgatagctggatcctcttataaggattcacctgattgtcaggtcttttgtctttttcgaaagtctagaatacactttacttattttttaaattattgttattccgtttgcagtttttggaagaacgaagctagttgttcagtaaaacatctcacatgctgtatttttctgattatttctccagatttgatttagatttagtacttctggcaggaatactacatagggaatgtgcatacttcttgttgtcacatgtcaggaggcacataatgtcaggttgttctactagtgagggtcacttggttaaggtggttactgccaggtctcttccatgcaaatatatttctttggtggctagcatgctaataagcaagtatattttgtgatcagtaaaatgccttacactgtgagactgtgacatgtcaccatctccaacatttcacccagggtttttagcacctattcatgattcttgcctgaatcaattattgcactggggattacaaagtggtgattttctcattttatactcccttctatattgagtagtggttaatgttttttggaaaagaagagttttgagcactgtcttgctttttggaaaaacaatgtatctcaagcttattttgtatttcccctgtcccaggtgtgcagtcacttttcaaaggagccttggggttctttaatgggaaatggtatttaggagccaagatctgggctgcaggtgtgctcctcatccaccagctgttattgtctttagcccactttaatggcaggaattaggaaatacattttccccttaaaattctgaattcatattgataacctccaattcaataggaaattgattcatatttgcactttccttttaccacactgagaaccctactttgcagcaacatgtttacactttttctgtaaaatcctgaatttatactgaaaatctccagttcagtaggaaagtgattcatatttgcattttcccaaccactttgcagcaacatgcttatacattttccctattctagaatgcacacaatagtttcagaattgcacacgaagacaactgccattaacaaacctcccaaacaaaggtcaagattcctttgcagaattaaaagtatatgtatttttaactttagaatatagccttcctgtaggaatgtgtgattagagtaatatgttcaaaagttacttgaattaattttttatttctatggttatcagtttgaagtacaattttattaattcgcatcttcacatttcctttttatccctttgatataattttacttttgcatacataaaacatttacagtttcaaaattcaaagctatataaaaagataaactcagaggagtctcacacataaatttcacccaatcttactcctacccatcaccagaggaaaatctttttattattttccggtatattttttctgtgttcctttgtgccaaataagtaaggatgtatatatgtaagtatacagaatatatatgtatacatatgcacgagtatgtatacatatatgttatttcccagtggtttttaataaaagtatgatgtaatttatatagcttcctttttgccattgataaaatattcaggaaattactccattattccattatgctttatacaggtattcctcatactttgtttgagttgaatattgttttattatgtggatacaacaaagttcattcgaacaccttttctatgaataaacacttgggttgttactgctttgtattacttcagggtaaattccttagtggacttgcattgccttttttttttctttaaggttttgtgggtttattttgttttcctattttcatctgaatattaaaatccttgtccagatgtaggaaaaaaatttgttggtatattcactgtgattactacaagtgtatgtaacttagccagatgatatctttatgatgttattttttccccaagaacaaggaatttatttccacttctttgggtgtaatttcaggtttctcaatgtgtttttggttttcttcatctaggttttgcacatttcctattacatttattcatataaatttatctttttttgttattttaagtggatttttctctttcattacatcttctaaataattattatttggatatttaaaggctattgtcttttatgataattttacatcattctaccttattgaattttgtatatttgtgtgtatctttgtttgtgtattggtttaacttctatttattagagtttccaggtacactggcatatcatatacagagaaaaagttttacttcttttccaagctttatgcctcttcttgttcttaaagtattagccaatcaaagcagacaagagaaaaatgtacattagctatagcagagatgtttggaatcaccgtctttttctggagcttgatagaaatacttctagtgcttatccattaaataaaatactactttaaaaactaaagcataaatactttatcattaggaaagtatttataaattctgattctattgagtatttcctgatgaaaacaggaaacattaaagtattcatttaaatatttcaataaagcatttataaaaatttcaaactttcagaatatttttaatacaatggtgtttctttacccagactcaccaattgttgttaacagtttgctacatttgctagtgtgtattttctaaagaaaagaacattttgtgacataaccacagcacaactaaaaagtcagaaaatttaatattgatataatacattgtttaatttatagtctaaattccaattttaccaaatgtttccataatgtcctctgtaggagtttttactcagttcagtatttaactctggacaattacctaaaatttagttgtgttatctctttcattttctttaattttggacattaacttattacttaattgtctttcatgacattgacacttttgaagagtaaaaggacaattattttgtgaaatatccctctctttggtgaatgcttcccagtgattggatctaggtgactttttggactgaaaaactacagaagttacttgagcttctttgcagtgcattgcttaaggaagcatttggtgtcagttcgctgcattattggctaactttgttcaccagccttctccactgtaaaattactatttttccttttgtaattactaaacactttctgggatgaattttggctgaattattttggactatgtaaatatcttattcccataaaatctttcacccatggtttccaatatccattgatttcatcaattatccttatctaataaactgtgcattttttaaattgtgcttttctaattcgatctttgttcagtgtttaatagctggcattcttcactatagaagaatgttactctgcattttaattttatttttaatgtattgaattataatccatctccttaactattatttatgctatttttttcctatatctggacaatgggagtccctgcatgctgctttttcttgttgtagttttgacaaatcctcatccttctttgagtactttcacccttttagttattttcatgctatgtaatttttccattcttttactttcaatttatctatgactttttatatttaaagtgaatctgttatatcatttgatcttgcttttattagtcctttctctgccttttaattgagttgtttagttcttcatacttaatgtaattatttaagctaatttagatgttccattttactatttgttgttggtttttgttcttttggtcttctcttttggattttttttatttcggtcttttctacctttggtttttatcttcttttcctgccatcttttggcttagttgaatatattttatggttttattccaatttattggttagtttttagctatactttattgatttatttttactaggtgttaaaggctttaatatatacagccttaatttttcagtctacttaaagttaggcccatttatccccctctgtccctgctctgtttgttgtgctctagttgttttatatacatatacatacattacagttacataatttaaaaatctccagatataatgccatatgttttgcttcaaatagccttaaaggttgtgtttttaaaaaaataaaaagtaaaaagtctttaatattttctatatttttaccagttataggattctatttattcctaggtatctaggtttccatctagtattatttacttttgacctggagaatttccttaagcatttttatactattgtctattagcaaaaattctcttagttttaatatatctggaaatgtctttatttcagcttcatgcctgaagaatattttcactgtataaagaattctgtattgaaagtttttctttcaacatagtcatgtgttgcttaataacagggctatttctgagaaatgtgttgttaggttaaatgtatcactgtgtgaacatcatagtgtgtatttacacaaatctagatggtatagcctactacacacctaggctgtatgatatagcctattgctcctaggctataaacctgtacagcatgctactttgttgagtaataaaagcaatcatctttcattgaccaagacatcattatgcattgcatgactgtattttaaagatggcattctactgacttctgacttccagcacttctgaccagaagtcaacagttctttacattattgtttcctttaatataatggctgtttttctctgatttcaatattttctccttttaaagctttttaaaaatgatacataacatttgtatgtatttgtaaggtacatgtggttttttgatacatgtaggatgtgtaatgatcaagtcagagtatttaggatatccaacaccgcaaacatttattctttccattgggaacatttcaaatcttctgttttagatattttgaagtacacattatataactgtagttaccctactgtgctatcaaacgttagaactcattcgttctatgtaactgtatggttgtgctcattaacctctctctcttcatcactcccctcaaacacacacacaacctttccagcctctgatcattctactccctaccaccattgaaacaactgatttttcctttatattagatctttattagtttgaacaagatatgcctagatggaataatttttctctctctctctctctctctctttctccttccgtctgtctatccctccctctctccctccctccctcctttccttccttccttccttcctttcttctttcctccctccctccctcttttgcttcttccttccttctttcctccctccctccctcttttgctccttccttccttctttctttcctccctctttccctcttttgctccttccttccttctttctttcctccctctttccctcttttgctccttccttccttcctccctccctccctccctccctccttcctttcttccttctttccctccctcttttgcccaggctggagtgcagtggtgtgatcacagctcactgcagcctcaacctcctggtctcaagtgatcccctacctcagcctcttgagtagctgatgccacaggcatgcacaccaccatatcagcctaatttttgtatttctcatagagatagggtttcaccatgttacccagactggtctggaactcctgagctcaatcaatctgcccccacttaaccttccaaaatgctgcgattacaggagtgaggccccatgcccagatgaaatttcctttgcattgcttttcttggcatttgttgaacttctagaatctataaatctgtgtctttcaccaaatttggataaatttgaggcatcattcatttcttcaagtatattttctgttccactttccctgtcttttcattctgggattccaatgacatttatggtagaaatgttggtattgtctcactgtccttgtcctttaaacaattactattgttctgtcttcaagttcagggactgatttatatgtcatcactaacctattgctaatcaaagcctgtaattttttaaaaattttatccagactatgggtctatttatgagaaaattagtgcaaaggagctactttaccattactgaaagcagaactcgcctgaaaaaaaaatgatactaatgcattacttttaattttcactttcattccctaaggatattttaatgggtatagacatcttgtttggcagttattttctcatagcacacatacacacaaaacaaaaatttgttttctggcttactttttttttaattcagaaagtatttctcaattttgttgctgctcctttgaaggtaactttgttttacttggctcttgaaggattttgtgttttggtttattgtttggttttatttttatatgcataaatatgagtctattttttaatttatcttctttggcatttcttaggctttttggatctgtacttgatggcttttgtaaattctagagaattctcagtcttatctactgaaatacctctgccacattctctcctctccttttgtaactgtaattaaatgtatattagacttctgactgtattatctatatttcttaccgccattcattcctttctttcttattatttttctatcacttcctattattttttctccatcctgtatatttcttttgatatgttctctttttgctaatttgctttttagctacatgatatttgctataaaactcatctactgatttcttaatttcagctacatttattgttccagaatgtcctcttaaatctgccatatcgttactggaaagttctgttctctgtaaaaaaattcaatattgtcttttatttttttggtttgaacatagaaagaataattatttagcataattattttaaaggctgtgtcttacgttttccttgtaagcccctgtgagtctgtttctaatgtcttttttctgctagtttcctttcattttgtttggccaagcagcaaaacacaatctcttatctcttttctatgtatggcatcttatggagcaatatttttgatcctatgtgattctctcatcaactgtattattatacccattctgaaaatgagaaacctgaggcttaaagatgttgagtagcttctcaaagccacatggatataaggagatccccggaattcagaaccggagctatttgcatttaaagctaaaggctgagcttttaacccttggctacctggaaaaagttgggctgatgagatcccatttttcccaagtggcagagccaaaatcaaaccaaaccattgttatggatggatatggtggtcaatgacagttctacattctttttcaagttctctatgcagacagattttgcagcagtgcactgactgtgagctgcttttgatacgtgatctggggctggacagctggctccttgagtgatgaagttgaaataaggaaatgaataattttatgctcattttagagaggcttctctgaggtttggggttaggcagtggtaaggcacctatcactttctgccaaggccaaaatcagccggtaacagccagcataactgaccccagtgtttgctttcttgccagacactccaaacctctctgtataggctattgtcaaaacaacagcagcaacagtagcaaaaaagagataacatttattgaatacactgtgtgcttgtcattgttctagaactttgtatttattgatgcataaacatcactgtaacaatgctatgaagtacattgtattaatatttggattttgcagatgaagaaactaatgcatagagaggttatttaacttgcccaaagtcatctgaaatagcacaactatttagagtaagacacagagctcacattcagggcccacgtcagagtccacactcttaactaccagttaattacattgttaattcattcccttttgtgttggtggtcctatggtgggggagaaattgtgtaactatcctagaaataaaatgcaggatgggaatgggagtctgaaagaagtcaagtcctggatcaatggagagccaagagccaggagctgaggaggggtcagtggtgagtgaaaagagtcagtggtgagtgaaaagctccagactgcccaacacttggtgcagtggctcacgcctgtaatcccagtactttgctcacgcctgtaatcccagtactttgagactagcccaggcaacatagtgagaccctcctctccacaaaaataattaaaaattagctgcacatagtaacatgtgcctgtgaccccagttacttgggaggctgaggtgacaagatcctttgagctcaggggtttgagatcagcttgggcaacacagcaagactctgtctctacaaaatattagaaattagctgggcatgatggcgtgcacctggagtcttagctactcgagagactgagctgggaggatcacgtgagcctgtcagggtcgcttgagcctgggaggtcgaggctgctgtgagctgtgattgcattaccacactccagcctgggtgacagagcaagaacttgtctcaaaaaataaaaaaaatgttaaaactacacagtcctaggtggtggggtatagaggtgagtgtactgccatagaagattgcaagaagaggacatggaaataactaccagcaatggtcgtgcctgaaaagctgtggatccggctgcatcctggaggctagccagagtttctcttattttttgcttttttgttttttattttttgatgacgaagtttcattctgatgtccaggctaaagtgcagtggtatgatcaaggctcactgcagcctggacctcaccccgctggagtctgaatttctacttagctactcccaataaaaatgtgtatgtctttggaaagctgccttttacaacagattcttcactgatttttttaataataaattaaggctttcgctcagaatctcttatgcaacaattcttccatatatgcatagatgtgtcagaactgactcaagcgttttattggtgaagaatctcagaagctgggcaattttcacctttatgaagtatgctactttattatttatttatggcttttctcctgatttcccacttgctttccttctttgtctagttggtggtgggcctacccactgctacgggctcctttcagctgataattgcccatcagtttttacttacactgagtggtggctctggaattgaggggcccagctgggttcctaggtaatagactgtggaggttcatgccctgagctgggcttccccacctaggcattcaggctgagcccagccagggccaacagtctagtgggtacggagcctgaacacagtgcctgtgctcagagccagcagatggctagatctctcaggaaatgccaccctacttggggtcgcctggcctccttggctgtgtggggctggctctcctttcttgatggcacctaggaaattccagcttccccaggctctaaagtccctgcccctgctagctctagaatacagaaattcacataaaagctagattcagtcccagcctaagctctcaggcttctcactctgccagacactcctgatgtcagatgaggccatgtggggacatctaggcttgttcaaggccccttgccaggcttcacataaagcccacccttgtgtgggtgaggcatgggcgtggatgatctgggtagtgagtggggagaaaagcagtgaggtttgggggaggagcactgggctgggaatcgggaagttcaagctcggcttgcctctgcattaactctcgaacttctcaggtgccgaactgctggaaccaaggaggtcctcagatctggccacatgagaaagcagcaaggtgcaggaaaacagccacagacattacagtccaccagaccagggtccgcgaccatttgtgcctgtcactcactcatggcttcggccaaatcatttcagtgtcttcatatataaaatggaactggtgatgcctgacatgctcctcaggtgcccaaccaggaggccctaagacaacatttctctaagcttcaagcaagatcttgacacagacatggactgccatgcattactgggaatgatgaccacatcaaaggtgcaaggatgtggattaagtgtcagctgtagctctcattcaggcttcacagccaccgtgtggggcaggtgggaccacacctggcaggtttcacatgggaactccgagagcatattaggttatgggcaccattagaactgaaaggattattttcaagtcccatttctagcacacctgtagggtctcaatgcgtgtttgttgagtgaaagaaggaacttccccaccccactcatcctatattctactgtgtcaactattcacccttggagggcaaagagtggggcaactcctgggccttcattctgcagtcacttttcatggggagagtgccccctttctgacctcctgagattccagtcgctggcatgaaaacccatccttggctgccttattccctgacaggtggggagtgatgccttttgccattcatgaaaaaaaaatgtaaatggtgacaaaagctatttttataatgtttttatctattccatgactgacatcaataacacataacagtttcattgacattgtatcgcatccaatgggcccagtgacctgattcaatgtcagtagaaaagcctcgtacatcatccccgtggctgaattgcaacagatccattaccaatgcttcaacctcagaagtgtcccggaaccgacgccaagtccatttcaagtcctccttcccaatcttcctgttttgtaactgccttagctatcttaccatggactcagtcaccctttggctcacccccttaagttgttccatccctgaacttaccgagtttcgagggtcaggacaggtctgtgcatttggtactatgtgtcacatagtaggagctcaatttatgaataaatgagagggggaatggcggggaggaggaaagaatggaatgtgggtctacacctcagttacagcgtgagtgcttttgcatggctctgtgttccttgcagcactaggactcagctagaacatccataacaactcagggtccttggaggagtaaaacttattctcattgcaccagctggctctgctgggactgaatgtaatcagaaaagagagaaggctttaggacatttttgtaaaatgaaaacctactgtgggagagaactccctgccccagacttcagccccaggacctggaagccagccagcacctgaggaagaggaggccgcccagccaggtgcctgtgctggactcacagagagaagcctcccagccagacccaccttggttctcctcatcttctcagctacacaaaatgggaacggacattgactctgcaatcttattacatgggtttaagagagccctcactaatatagcaatatatgtgtcatttgtctcactagtaaggctgtttagtagtcaaaactgtagaaaattgaatatacacttactgtataaaaatgatatgcttggttagtgatagtttaaaagaaataagtacatctatcatagaagaactggctgtcagctctttatatgtaagaaaaatattgaacacaaatgtgataaatgttgggcactattttacaaaagttatccaacgaagttggtttacagtaagttcttcccagcaaagaggaagataaaaggaaaagagagagacaatggatagaagaaaacaagacaaagggggtggggaacaaggagagagaccgagggaaagaagagctccaaagtgttgagagaaaaggccccaagcactgtcctcactctggcatcgcgtagcccttgcctgctcctgcatccctctatttgggaaaagtttcctccccaaagggagctcagatggggaggggtaaatccagtgcagaagattccacgtcatggagaatggctgatgaacactcggtagttccatccccaggccaccagaaaaggcagttggaatggatcttgctatggtccagaggcaaaagttgggtagactaagagaagaaagttgaactactgatcaacagtagtacttggggagtggctccataaataaggaagttccaggtgggaagggaattctaaaataatgtgaggagctcccagtggggtgttagggtgctaagggggctggttgtgtgacctctaagctgggccctgggatggaggtgggcccctgtctggcgatggagcagtgaggaggtcaacaagtccactggggtcagctccgaggagcccggggacagggagtgtggtagaggaggacaaagaggacagaggaggtgggaggcccattcctggaggacatgggacttgactgagctttgagcctgagtgggtagagagttcttccagtcagaggagagtccaaagcagagggtgtccatctccatttggttggaacagagaaagggtgcatttgagggcaggggtaacagagataagaccagcaagagctagctgggagcgtctatcttggcatgcaagaagggcttgaaatcaaattcaaatggactcctttgagatccggtagatagagggcagccacagagggtgtccaagccaggcagagtgagagtgggagtgtgacagagcggggaaactcatgatgagccggagtgcccttcctccccagggctttgatctccagagatcaaagtgcctccaccagcatgccctcctctcccatgtgcgccctgatacacctctgcactgtctgggttccccatgagggcagagcttcaaagtgggacccaggggctgaggggagattcagaagtactcaggagaggaaggtgcagggatgggcctgtggaggctcaggaaggtgaatgtcttctctgcccagctcgagcttaggagaaagtgggaagtgagctgagagttctgtgcctcgctttacctcttccctattttcccagtcttaccttcattccattcttccttccttctcgctctcttccttcctttcacctttttcaatttgagccaacactggcctagtactgactacctgctaagagttgttagaaacaacttatggatatcatctcatttaatcctcataacaaccctgtatgtggcaagtgctgttactgagaaatcaatgggctccctgcttaaggcacatagattggatcttgcaatagggtgatgccaggaggcatgatccgattggatcctgccatggggtgatgccaggactcagtatgattgagtcctgatcctgccatgcatgtccacatcttaattcagtccccactccttgggagtgcttacactccctcctgcttgcacacttagctcatgtgggcatgcagaggttatgtgaccttcaacatgtgggtccatggcagctgaacaacaactcacgactttgttacataaaagttgaaccagatgggtgtggtggctcaagcctgtaatcccagcactttgagaggccgaggtgagaggatcacttgagccacggttgaggctgcagtgagctgtgactgtgccactgcactccagcctaggcaacaggagtgagatcctatctcaaaaaaataaaaataaaaaagttgaatcagattggtctaaagcagttacagtactacaattatcccctttttatagattagaaaactgaggctggggggaagttaagcattgttccaagtcaccccgtgagtaagtggcagagctgggatttgaacccagtctgtctggttccactgtctgaactttgctgcctctgaataattctcctccccaaagctgcccccatcaaaaaacaaaacaaaacacacaaacaaaaaaaacaccagtaatgttccggagagaccccaggtgttcagcaagagtattttgactctgtcttttcctttctggagcttgtctttattggagctgggaaggtggttccagggatgagggtggtagggtgggatacaggaagctcccctcagtgaaaggcaggaagactaagccttcacccagctctggcagtcccaagctttatacctctgggcttatattcactgttcccccttctgagtatccaatgtccatcataccactctgtatgcccctgcacacctatagcttagcttccacttataagtgagaagatgcaatctttgcttttcttttcctgagttacttcacttaggataatggcccccagctcctttgaagttgctgcaaaagacattatgtcgttcttttttatggctgagtagtattccatggtgtatatatgtcacatttactttgtttgctcatcagttgatggacatttaggttgattcagtatctttgaattgtgaattgtacttcaataaacatatgtgcagaagtctttttgatgtaatgaattattttcctttgggtatccagtagtaggattgctggatggaatggcagatctacttagagtctttgagaaatctccatgctgtgttccatagtggttgtactaatttacatccccaccagcagtggatacgcttggggatgtgttttttaaggaagggatgacaccatcattactgatgtatggtgagtcccagtgtgggtagagccctgggccaggcctggaggaggaaaaggaggaaaggtgaggggagtcttgatttcctatgagttcatatttaggcagcccagccactctaaaagtctgagggttcttatagtatcagagctaggaaatctggtagtcacaaagttgacttccatcttttcagctggggagacagaggcatgtgacaggttcgtcagtgccagggccactttgggtcagcagtggcagggatttctacatgtcaatgcacactcaacattcaattcacactcagctcattcctcaacgaggcttctcctccatgggcaggctccctgcatccttcctggtcaagccctctctttcttcatcttcagtgctgaggggaggaaagaggaggagaagagaaggggtgattgccaaaaccctggagcgcacccaaaccaaacggaggagattctatcttcactttgcacaagggatggaagaagctgagagaagggcccagtgtggggtaagcagtggcccaggcagagtctccatgcaggatattcacatcacccttgggacagcccggacagcaaacctgactttagtgcatcagcgacattctcctgggccctgcaaccagcgcatccttactggagctctggctttcttgcacaaatactgatgcctcctgagatgtcctcccagctcactgccccttccatcattgcccacccctcctccacacagggaagttgatgtgtggagtgggactcattattaagttgaacccttagcctttttcttggagaagggtcctgcccaccactggccctgctatatgtgtcccttctctggtccatcttgagccacacagaccccagaccactgtcctgaggtccttccttgtctgtgtggctgacttcccatctgggatcattctcacctccatcctcccaccccacaggtgttccagaactgtcctcttcctcctcctctcttatcctgtcttatttgtaggagttctttatatattccagttaataaccctctgtcagtttgatgtctattttctacacagtctactattttaattttgcctataattttttgtggttcagagttttacaattgtgtttcacttatttattcaacacatatttattgaatgtctaatgatgtcaaattatcagccttttctttgtctttttacttcttgtttgaaaagaactttcttatcttcttctctgattttatagtagttttttatgtttagattctgtaatgcctacatttatttttttcaaatggtatgagataggaatttcaatatatatttttaaatgtatactatatttcataggccctcctgtctctagtctttactaagttctcatatggacacagatctatttctgaattcacttttctgttctactactctgtctattctagtgctgatacaacttgctttttatcaaaatgggattaaaacatattttggacaaacactccttctcttttatctttaaattttttacagtttcttggctcttcttgcacagaaagtcttctatttaaatatcagaatcagattgtcaatttccatgaagaattttgtttgtcttttgataaattctaggttgaattcatgaatttattttgggaaaaggggtagattttccatgctgaagcctccctttcatgaatacagtttctgtctttgttactccagtttttggcccacctcctcagggtcttcctgggcaggaccactttcctcagatgtctgtatttctaaatctttgccttcctactaactatactgtctcatttcccactattgttattcccgggcaatggaaagaatgcaagcacccaaaaaaatctaatggcccatttatagttacaaaacaaatgacaaagccaagaccagaactcaggtcccttgacattcacccacctcatggccaggccccaaccactgaactaccacacccctgtagctactacctcctccagtgcttcatctccatccctcacacctccctgctacccagccttacaaaatacagtactttaagctactgtatatgcagatagctgcccgtgaggtcaggacatttatttgaatgcttacttagtgcttactgacagccaagtccaatgttatatgctggatataccaaaatgaataagacaagacccctggcctaagggtgttcacagggaattagatgtgtgcaaacaagttacaggtgtcacaagtgtgagaggatgtcatagtctgtttgcactgttataaaaccatctcattaatgtgtatcttataaaccacagaaatttatttctcacagttctggagtctgggaaatataagattttatttttttatttttatttttatttcattttttttgagatggagtctcactcttttgcccaggctggagtgcagtggcatgatcttggcttaatgcaagctccacctcccaggttcgtgccattctcctgcctcagcttcccaagtagctgggactacaggagcccatcaccatgcccagctaatttttttgtatttttagtagagatggggtttcactatggtagccaggatggtctcgatctcctgaccttgtgatcagcccacctcagcctcccaaagtgctaggattacaggcatgagccaccgtgtctgaccaggaaatataagattaagatactggcagatctggtgtccggtgagggcccacattctggttcatctatagtgccttcttgctgcatcctatatggtggaaggggcgaggcagatctctgggcacaaatcttattcatgagaactctgccctcatagtctgattacttcacaaaggccccacctccaaatatcattacattgtcaactagatttctgctattaatttgggggtgacacagatgttctgattatagcagaggatgtgtctgggtatgcctgatgaactggtgagtgaacagctagacgttgatttgcaatgtgggttttgtcgggggtggagctgtttacaagggagccaggaaggaatcaggatatactaccagatactggctgagctgtacccactgtttcttgtggacttatagcttagccctgtagagagaggtgctgttggcagagcctaagggaaggctcttttgcagccttggagacacacaggacccaaggaaccctgcttgatcatcagtgccaagcacaaaccagagtaggtgaactcagaagaactttgggcagtgaagagcccagggaacatggccactgtgtgaccctatcagccatgcccaggctgagactggtataccaccagcacctgtcttctccggaaggctctgagcaaccgcagcaaagggagaccccactccgggggatatcaatgtcctcagaggcaaacagactcaggtttgaatcccagatccaacaatgaaagcttgtggtcctcattacagtaccaaatggtagagtggacaagaagaagcaaattccttgattcctatgggaaggggattcaaacagtagctcagtggacatctgactctgaaacccgcatgtctgccttgtgtgaggtgtccagcgaccttagcgacagattatttgccactttccacgtgacctggttccaacagagggtacaaccctggggtggttgtgttgtttttctcggaatcactggtttaaagcaaactttaggcaaacttgactggcacaacttatgtcatgtctctgtagcactggtactttgaattacttaatgttatttaaattgatatttaatttatggtaagagggaacttgtggatcagataaaataaaggcaagggtaaagggtaaaatagacacatgacctcagctacaaagttagaggacaggaacctacaggacctggatggccagaatgggtcccagagaagagactgagatagtagagggagaagtagagaggtggccaggactggaaagcagcagggaatgtgcagtcagccttggaggataatggggtgcaacctgagagtgaggactggggactgaggctggagcagaagatcagagggaggtgtgaggagtagtgggaagtcgatggggcacaggatcggaccctgagataaaggggatgcaggttagggaatgggagcccagccagtgttgaaacccatgggaaggctctggcagggttttaggaaggaagactaagggtgattgtgggttaatgagaaagatcaaaggaaatcaatacgttgaagcaaagtgggtccaggcctgtgtcagcagacagaccttcctagagaaaaacgagaccggctggaagctccgggttatggtctggagacctgtctagtcaaaccttgatcaaggcagaggcctcacagactcagacagagagaatgagaactcctgcatagagtcaaagccagccatggcttttcattcaatttacatgtacctgcactgtagggcactcatgaaaagtgattgggagcaaattgagaaagatgaaagaacagagttctttctgcaaagtacaatcactgtgcaggattcctttccacattcaggctctgagagggtggaagtccaagatcaaagtatttgcagggatggtttcttcttaggcctctcaccttggttttcagatggctacattctcactgtgtcctcacatggtcatctttccatctgtgttatctatgtcctgttctcctcttttttataaggacactgatgctattagattgaggtacactcaaatggcctcatttttaacttaattacccctttaaaatccctatctccaaatacaatcacatttttgaggtactaaggattagggcttcaatatagaagtttgggggtacacaattcatcacataacaaggaccaggtgggatttattccaggtttgcaactttggcatgctacataaaaatcagttaacataatctaccatactaacaggctaaagaagaaaaagcatatgataatatcaattgttgcacaaaaagcatttgacaagcttgcacagccattaatgataaaaaactttcaaaaaactgggaatagagaaaaactttcttttttaagacagcgtctcactgtcgcccaggctggagtgcaggtggagtggcgtaatcatggctcactgcagcctcaacttcctgtattcaagtgatcctcccacttgaatagctgagactaaaggcatacaccactgcaactggctaattttttgtattttttgtagagacgggtctcagtatgtcccccaagctggtctccaactccttgcctcaagcaatcctcccacctaggctttccaaagtgctgggattacaggagtgagccactgcacctggctgaaaaacttccttgacataataaagaacacacacacaccctacagttaatatcgaggcaagagtatccactcacatgacacctattcaacattgtagtggaagttctagctagtgaaatagacaagaaaaaaacttactgactggaaaagaagaaataaaattgtctctatttacaaataacatgattttctatatagaaaatctcaaaacagtcctccatctaaaaagaaacaaaaatcatacacctagagctaaaatgtcggccatgtttacaagatcaatacgcaaaaataaaatatatttctatataccagccatgaacaactggaaaccaaaatatttttaaaaatcatttacaattattaaaaacatacctaggtttaaatctaacaaattatgtatagaatcttttattgaaaattataaaatgtggattaaataaaaaaggcctaactaaatggagggatatagcatgtttatgggttggaaggttaaacatagtaaagatggcaattttctttaaactgatctttagatttaatacaatttcgatcaaaatctcagcaaggtttattgcagacaaaggcaatcttattctaaagtttatatggaaagaaaagggatctgaacaaatgatctaaaacaactttgaaaagaagtataaaataaaaagaaccagtctaaccaatgttaagggttactatgtagctatagtaatcaaaatagtctggttttggtatggggatagacacatgggtcaataaaacagaaatagaaccctgaaatagtttaaaatatgcccaaatgatttcaacaaggtgtaaaaacaattcagtggacaaagggatagcattttcaacaaatagtaacggtgcaattggacatccataggtaagaaagtaagccttcatctaaatctcacaccttatagaaattcagaccaaaatggatcacagacttaagtgcaaagctttatctattttagaataggaggaaatctttaggacctaggactaggcaaaagtttttagacttgacacacacaaacacacacacacacacacacaagcacattttatgaaaggaaaaattgatacattagacctcatctaagttaaaataacttttgctattaaaaaattgtaaagatgaacaaactgagggaaagcattagcaagtcacatatccaacaaaggcctcgtatcaagaatgtataaggaagtcttaaaagtcaatagttaagaaaatgaacaatccaatttgaacatgggcaaaaaaacatgaacagacatttcactgaagaggacatacagatggcaaaaagaaaagaacatgaaaagacattcaacataattagctatggaagtaattcaagttaaaaccacaatgagaaaaactcacataacatgcagaagagaaggctgtgtaaaggcagaggcagagaccggagtaagatccatctcgaagacaagaaatgccaaggacggccatctggcaaccaccagaggccaggcgagaggcatggaggattccttcaccctgagccttcagagagagcatggcgctgctgacatcaatttgggacttctagtcttctgagctactgtgggcaataaatttctgctgtgttacaaaattacaaaaacacaatgatatctcactactcacctatcagaatgggtaaataaagaatcttgattttaacatatgctgctcaggatccagacaacccagaccgctcatcctctgttggtgggaatgtaaaatgctacaatcactctgaaaaacagtggggtgtgtcctataaaactaagcacacacttactatacagcccagcaattatactcttggacatttatcccagagaaatgaaaaatctatgtttacataaacacgtttatgtgaatgtttatagcagctttatttgttataggcaaaaactggaaacaacctaaatgtatatgtatgtgtatgtatatgcatatataaacgtgtatatataaggtttctttttgagataattttttttactcaatataattcttttatacaccctccattttgttatttatatcaatagttcattcacttttattgtgcactattctgtggtatggatgtaaaccggtttgtatggttaaactagttcgtttaaccatttgcctctgaagggcatttaggttgtttccagtttttgcctataacaaataaagctgctataaacattcacataaaggtttttatgtaaacatagatttttcatttctctgggataaatgtgcaagagtataattgctgggctgtatagtaagtgcatgcttagttttataggacacgcccaactgttttccagagtgattataccattttatattcccatcagcagtggatgagggatccggattgtctgcatatttatatatcaaatatatatatttgaaataacaaaagtacagagctcaaggatagaatagtagagttagtgataggacaggagtggatatagctgtaaagttctagcacaagaaaacctgtagtaatgaaacagttctttatctacattatggtggtggttacaggaatccacatatctgacaaaattgcacagaactacacacacagacacacacacacacacacacataagtaaataaataagcacatgcaaaactcataaaacccaaataatctctgtggattatatcaatatcaatttactgatttgttactgtattgtacttacgcaagatgttactgttggggaaaactgggcaaagggcatatggagcttttctcataagtttttcttcaacttcctgtgaatctgtaattaattaaaaataaaacatttttaagaaattcaagaggagacttagagaagaactttgtgtggataggaggggttccggcagagttatgggttggtgagtcaccagtatttgtttaaaccaaggatttgggtaaaatcactccaagagtttgaagaaagtttccacctcagcatttaaacatctggtggggtaggccctatggagtggagagagatgtaagggaaactctacacaagggaaagacctggctatgagagaagaaagtatctcaattaggaaggagtgtggactgagtggatgcaagcgagaagttcagtaagttggagtgaagtgtctgtggtgtttaatgatcttgacgagctgtgtcagggttgtgaaatgatgggatgatggagtgattgagggaaaaatggagtggtgagcacaggatgtggaaaaaaaaaatcgaagatctctagaaactggtcctttgccaagccttggtgttgggcgagggggacagctggaccatttattagcttgtttactctattactagaataaacctagcaatattctaggtttgaggacctgagtgatcctggggaaaagcttcctaaagaaaacattgaggcatctcaggctttaatgacctatttactcaacactggaattagagcagtgtgatatgtgtttgattcaatacctagttctgccactatcttgctctgtgatcttgagcaagttacttgccttgtctggacctaaaaagtatgcgtgtttttccttttttttcccatctcttcagtacccttttcctctaacagtgcagttccacctctagacaagaaagaagactcccatccttgctttggtactcctatagctgtacgcctcctgacaggacaagagaatgtgactggataaagccaatgccttctgctctagaccacaccagctaggtgggcccccgcccagatggtcctaagcccacttctagaatttcattgacctcttttttggatcttacctcccaactgcagaccacacactgggctagagttgtggtgaagggtctgctgtttgcaagtgtagacagagctggaacttgtgagcttggtgtccatacataaaaaattggaggctctttatgaggcaagagagagaagagtgggagagggagtagttagtaagctggagtgagagggttgggtgcattctccatgtatagctaaaattccaaggtgttggtagaaattctaaattcaagcctgaccttccagttgttatgaagctttatttgtcaaggtgggagtatatcgcattttaaaaaatagtttgtaacatgatttgtaacatttagaaatgtttatactgtcatgctgggctctgtaagtgttcagatggggcctgtgacagtccccttggaggaatgtcccctccctgattatgtgcagtttggagagacagggacttcattgcactgccttccttctatggaagcagcagaagacccttgagcctgcttcttccagagtcttctttttttgtcattgatgattgacatttctaatgttggtagtcaggtatgtgacttcagctcagacaatcgtattctttcttactggacttgagacttgggtggaatgactttgaataaaataaatttcagatgatgttcattctagcaggagtggatgcctgggttggggcatacctgttctgactcaggtcttacagctgggccccacctccttctccagactctctttcccataggctctggaagctcctcaatatccttctcatttgtgcttcatccagctggtgggtttctgtaggttatcatcaattaatcctgtggctattttttttaggcctcagatttctgttttgtccatgacctcacagagtcttttcagctctgatgtccagtagctcatgttgcagaagtttcagaagctactcagcttttccaaaataacaagttcatacttgtaaatgggaggtttctcagctattgatgccccccaaatagcatgagctgggtagagctcggggacaggagaatgagtggggaaggacattggacttggggggaagctgataagtccatggccttgaagtggactactgttgaggaatttctgggcttggtctttgtaccaaaggcaactgtgtgaccaacattgtttaatgggttcagggtgaccctaagttattccacctgaaggccagaagaatacaactccagctatgtacttttcattgaatgatccaatttaacccaatctaattagctcacattggtgccagttgaaggccctgaacatcactggattcttcaaggtggcgtgagttagtatctgccccagggagctcataggctgcacactggtttgacaggctttcccaaagcacctctcccgtcttctcgctcttactcctcctgagcaagagaacatttgcaccaacatccggagcctaagagatgcaacatatgcaacatatacattttaagaataaaaaaaagtatctgatttttcagaatctatataaccaaaagtgctagacctttctacccctctctgccctcctccctcacccactccaagcataaatatggaaagagggtgattcagtataattccatttggccagggctggagtggtgtctggaacactccttcggaaagatggtagacaaaacctctgtgcgatccagactctgggctatgtgactggattgcaaagtggtggtggtgttgtcctccttcttagtgcagggaggctctggcagtgagtgcggatggggaagtttgtaggcttgatgagtttgttctttagtacacagctcactctgttcctagccccctctgcagatgacaggaggtgctagacggtggaaagtaagatgtgtagtgctgtaggcagaaatttgatatggtgtaattactgtacattaaaatagatggaatttggatttgaaagcagagcagaccatatcttacgtgatgatgagaagggacacatcaccccacactgcgtcgcatgtgcctgaaggagcgttccagcctctgaaaatggcacatggaccaaaacgtccaaataaacacctcattgccgagagcaggagggggaggaagttctcaccgaggcagttgagagtagacgtgaatcagaaactacaatcgtatgaaccatcttttggttcaaacttgtacttgaatataaggcattgcaattctcttttcagaaccaaactggagccatgctaattcttttctgtggggaggatagagaaaagcaatagaatctcccaaggttttactgaaccacttgtgccaggttaggtcaagaagacatatgaggaagatacatgttctaaggagtttgatagtttatttggcaatctaaggaccagtgcaaataatttttcaaatatagtctgtaattgaatattattacacataatgcaagtaggaatgtccaaaacgaaagcatatgttgggaaggttcaacttgagtggagtggattcaagtagacagagggcaggaacatgtgctatctgattgaaagtgggggaacagtttgagaaatagtacacaggtgaatacggagatgctagatgcatgcagacgtgggaggaaaagagggagaccactttgttggcataagacaaagagaattcaaatgccggatggggacctgactagagagtctagtgattcttttctgcctatatcaaccctcagagcttctgatcatgaaataccaggttaaatcctgggtcaagcttcagagggtgggaaagaaccatgggaagtggtgtgcaatgacattttattaggaagagtgccatcctactagtactgattctcaggttttgattgggttttggattttctttttgttcatctattgatcttactgcctcagcgaatggaaagacagcataaagttgccttaattcctctgcaaagcattactgaatttttagaaaagaagatgccacgctgggtgtcctggccaccaggctggctttctctgagtctaacactgaatttcccgacctctctcccacatggcagagctcacagctgccaccactgagatgcagcacctgttagggtgattttctgaaactgctcttaaaagacattttaaatatataaacgtcactcctggaggtaaggccattttgaatgcaaagtgatcatcacatcttttgcaatctatttttagacttctttcctggagccagaagaatatgggccaactagttaagagggaactgaaaataaagcttggactgcagatgccatcaccagcattcacaagctgagataatataatggaccatgtgtttgcacttgcgctttacctcccttttcctcactccctctccttgagacctctgccaaggttgacacctggagcatgaagggtggagagtcagcaggcctgcagaaggcctcttggccagcttgctgttcaaaacaacatctggctaggagaccatgatttagctccaccctccacctccatcttacacacacacacatacacaaacacaaacacataaacacacaattctgcccaagtaccaatgaagacaaatggggagaagaggaaagtcgcaccgtcacccaaaaaggggctaacagacattaatgtcagccgatgaaaggcattgaccctagtaccaatgtctttagaaatacaaagcggagtgggaaaacacagttataatgacatccttttacttgcttttatttgtctttgacagatctgctagaaaaaaaatgagaaaacctaaataatatgacttttaccttacgcagaatatatctttgtttctaacacacatataggaacttatattagttaacaaaaactcaataaacttaaaaaattataaacatgtttcacacataatgtatttacttattaagtataactaaagtaataatgacaaatatttttaaaacaataacaattgttaggaaattaagcaatactctatgaaatacctttttgccaaataaaaattcaaaattttaattacatatttctattatatttatagaaaagaaacaatgcaaaagctacatatcgaatctcaaaaacagtcaaaattcctctccgagaaaaatttaaaatattacatacatacattatttaataacattgttaatgaattaagcattaactcaaggacatagaaatataacaataaaaacttcacagaaaatacagaaccaaatcgatagaatcagggtttaaatacattagaaaaagtaaataagtaaaataaattatatatatacttattctgtgcatatatatacgtacacaaacacatgcaatattttaaaactttttgtttttggaaatgctaaggattgcaaaaaagaggaaaaatacatgaccagtataaatattggagaagacgaaacaaaattatcatgatttgcagttaaccacattgtctttgtctaaatgttaagacaactgaacaatgattcaaagtaacatgaaatgtaattaaaataaatgtcaagattctctctgaagttcaacaaagtgattttaaagtatatgaagaaatcaattcaccaagaaaaaaaagttatatccagtaatgcagaaagtcttgcctatatacattataaagctacaataacaaaatcagtatggtttggcctttttttttgaccaagccaatggaccagaaaaaaaaattcagaggcattcctgggtttatgtcaaatggaatttaaaatctgtagttaaaaattatatggctcaatcaatgtgttgagacaatgaccaaccacatgcaaaaagaaatttgatgactaatttatgtgaataaaatgtttaaatgtaaattataaaattaaaaaatttagaagcaaatgtgggtgtatatatcattgacagataaaagaataaagggggaagctgagaaaactttaattataaaatgtgtaatactttgcccagtttgctctttctactttaattatagtaaattttaatcctaatacaattaaaatgctttctattgtagcaaatatataaattaactcatttatggtaggtttgttgtcttgcttggaaaatcctatgtgtgtgtgtgtgcctgtgtgtgtctctgtgtgtgtatgcatgtacatattaaaaacaaataccccctgaaaatcagactaacataacgtttaagagtatggattctgccagtgcggcagacttaatttccaagtatgtgtgaccttaggcaatttaattaatctttttatgctcaatttacttatctgtaaaatagaaataacatttcctaacttattggtgtgtcctgataattaaattacttggaatatgtaaggcacttacaacagtagttggcaaatttaagcattatatttgtgctattataattattaaaatactactaatgaacatgagaagtttctttagaattgaaaacgcacactaacattactaaaattattttacatttattttgttcaaataaatgcaatttaaacattaatgaattcttatttttaaccataaaatgacaaaaccaaaacatttcaactgtcagcaggttttcagagaaataaacactgtattaattggtttcaaactgattttatttttgtcttattcttaattgaaacttaatttcaaacatagcagtgcaacttggcaatacctaataaaatattaacaatacatatacttttaatccaacaattcttcaccagtaatatatcctatggaaattatacatggacaaatgtttagctgcaagaatgatctttccagtgtttagaaaattggcatgatttcttttttaaatgtctgatagaattcacaggtaaaaccatctgagcctggtgctttattttctgaaaggttgttaattatttattcaattactttaataaatatgggccaattcagattgttgatttctcttcttgtgtgagttttggcagacaggcttttaagaaattggtccatttcatctaagttatcaaatttgtgagcatagagttaattctaatgtttatttattatctttccaatatgtaagggatcagtagtgatgactcctctttcatttctgatattagtaatttgtgttttctcttgctctttctctgcctctctctgtctgtcttttggttgccctagctacagttttattacttctaaaaatacgatcaaagtgtaacttttgagtctgttgattctctctattgattttctattttcagtgttatttatttctactataatttttattatttgttttcttctgcttaatttggctttgattttgttttctttttctagcttcctatggtggaagcttagataattaattttaaatccttcttcttttctaatatgcacatttaatgctataaatttccctgtaagcactgtttctgctgcatcccacaaatgttgataagttgtagtttcattttgttcaaaatatgtcttaatttctcttagtatttcttttattcatgctatttagaaatgtgctgtttagtctctagatattttaagatttttcagcttctttctgttgatttctattttaacttcattatgatctgagaccagacatcatattatttctatacttttaactctgttaaggtgaattttatgacccagaatgtgttatatctcagtcactgtcccataggaacttgagaagaatgtgtactctgctgttgttggatgaagtattttataaatatcagttagagccagctgattgatggttctgttcagtttgactatattctaactgatgtttttgccttaggaaactaaattactgatagaggggtgttgaagtctccagctataatagtaaatttatctatcaacttttgcctcatgtattttggccctctgttattacacacatacacatgaagtttggagaattaacatttttattataaagtgcctctctttattcttgataattttccttgtgaagtctgttttatctgaaattaatttagtgttttatttttattacttctagtttggtatatttttctccatctcttcacttttgtgtctttatactgaaagtgaagttcttgtagacaatgtttagttgggttttgtttttatatccactctgacattctctgtcttttaattggtgtatttaaaccatgcaaatttaaagtgattatagatacagttggagtaatagctaccatattgtaactattttctatttgttgcccttgttctttgtttcttttctttccttatactctttctggtttgaattgagtatgttatatgagcccattttctcttctctcttagaatatcaagtatacttctttttacatttttaagtgattgcactagaatttgcaacatacatttacaactaatctaggtctactttcaaataacattataccacttcaagtttagtacagtactgcataacacagtattcccattcctcaccagccccttacaacattactgtcattcattttccttatatacaagctatagacactcaatatgttgttggtattattattttgaacaagttgttatctcttacatcaattaagaataagggaaataaaatactttattttaccattacttatgccttttctaaagctcttccattttgtatgtagatccatgttcctgaccaatgctcttttctctaaattgatgttgtttacaagagtaaaatttgggaaacagaataaatattcatcagtaggataaaaccatggtaaattcatataatggaaaactattaagctgttgaaaataattgcaagcttccacacttcacctgttctccaccttcccactggtaaatgaatcagagctgaggaaagttcaccaggaaaaaaattccaggcatcctgtgagcgtatttcagagagaattaaccatctctacttcctcttgtgcttctgagagtgttttccactgctgctgaggtgacagaggctgtgaagaaggagaacagagtgcccaacagcacgcagcaggacacagaatgtagactggcagccttgagttgtgggggtgcttagagtaggagcccccattaaggtttgcaaagtgcagctctcacaacacggggtcaggtggctggagaggggctattcctttgtcctgttaattacttgggttgtttctagaggcattggaatatgactgatttcccccaccaagcgttaactttgcctactcctcattcagaaaactaggctttgttgttctcccagcttcaggaaagggagaagtttttcccagaggaaaagagggggaaaaaaagtatctttctttctccataatttcagcacaacctagacccttggaagaacttcagaattctaggtatgggcaacattttaaagaaaacttcaggactcaaagtttcctctggagtgcagggagagaagcagagagatcagtgttctctgcaggggttccttcggcctgtaccctaagctgaaccttaataggaggaaagcaacccagaaaagttcctaggaaatctaaagcagtagtacgtggcacagattccttaacaacagccaggaaaggcaagaaagtcagtgaaggcagcaaggatttaagtaagctggtggaatttctagacagtggtaaagcccaggagaagcatgcatctcaatccccatgtgcttgagggcagtgtggatcttagggatggaccccctgtagcagtggaatggcccagtgactcagactagacacggggataggcacattggtgaatgtcagatggtattgagtatcagacacccagccttcactctatgagcccaggctatgcatagccctagaagcaacctgtgtggaataagtgaaagaaacccccagtttttcttaacttaaatttctataattcttataaaatggctgctcaaaatggatgttaattgagtcacaaaaaaaaaattatatttattaaattcttgtggttttagactaagattccaatttgatcattttaatgataattttaggcccaaactttcctggggtgatgatgtgaggagaagggagaataaagacaactattaccaagttgttgggtctgaaagtcccatctcactaagggttaaggcagaccatttcttacccaaactgaggaagctggcagccctgattgtaaataaggaattaatgagtgcatcaaagacaatgttgagattgcataaaaaatgaacagttcacaccttattttttcaaagttaacttttttcagcttaaaaacctgataaatgatttcaattaacagttacagaaaaagaaaattatattgcaaattcatgcaaaatcttccttcaaaatcacttgcttaattacacaaatcaattcttcagactgaaaatttagttctaaaatagaaagtaggaatgtttcagaagcagtcacatgggtaaggtgaaaatcgcagggtggtcggctctggcctttgttttatagggatgaaacatgataaatatcacagaaatctagtgttttatgacccaaagttgctccataaataacttagaatagtgtagtacattagaggtctaaggaagtacttcagacctggttcattctcctctttgggcgaaagtaacaataaaccctttaactctgagacagccccagaatatgttagttctggagcaattacgagttgccaagcaactcaaacaggcatgtggatgctctgttatgatccaaagaaatctttgtcatcatcattatcttcatcatcattgccatcatcactgccattattatcattaccatcatcattatcatcatcattgccatcgtcatcatcatcaccacctaagaaccttgcaatcatttggatgaaccttgatgtgatagaaaaggtattggggttagaaggcccagatactaaactgactcagcctgtagctggtggtttaattttggcaggtttccctgctctgggcctccctttatgcatgtgtggctgaggggatggtctcgataagcacagaggacccttctcagcattctctgttatcccatgcttgcccctgctttcttagttcatgaatctttaaggtctttgagggcaaagaccttgtcttgttgaccacgatatccctcagggagcttgtctgtgcttgtcttagagtatgtgactaatactaattggctagtgtaaattagagttgagtctgttttgttttgtgggggattggtggtgtgtggaagagatggagaaagacagaagaagcagtaaaatgtattgactgtttagagatgtaagtttttctcaccctcccctgatcaccaggcaggtaacatcctgggaccttggtctctaaaccccggaaaacacattcatgttatgcagcatgtttgcttgtctcatccaatatggtgtcatactccaaatttaacatcttttgatctatatctacttgagttcaaggtgctcttgattttgagaattatgaattataaggccaagctatcaatccccacacaccctacatacaatgttgaagtggatagtaaaatcacaataaatgcttcctttgaaaagagggaataatgggaggtatgtagcagccaatggtttatgggcattctgaaaccctactgtgcaaacagggagagcattacttgactaggtcatggttctgttttctgagagtggtttcccattcattgtttttcaaagatcttgacaccactgtttgagatcccatttgttttctatcattctctttgactacttctagaaaaactggcctgccttggcaatgagttgctttttcagcctgcttcttgaccttaagaagtttggggcccaggagtgtctttataattcaaaataaatatcagttttttttattatatactggtggcattttgccaattcaatttcattaaaaacctcatggaccttctatgtatctaactagtttttactccatgcttcagattccaaaactaaaatagcctttgagaaagacttttctcttttaagttactagtttgggattaggcctccatgtttttcatcttctctttagtctatctgagaacatgtatataacatttacaaggtaagtgacacctatgtttagtttcttgtactcagggctcattttattttatttactttaaaaattaatatacagtaaaattgacttatgttgcatctacagttctatgaattagaaaacatgtatagatttatataaccaccatgaagtcaggagggagaacattccatcaccttaagaaagcccttttataatatttctttatagttacatttttcccaactactaacttctgataacaactgatctatttttcagcattgtattttgcattttcatgaaagtcacataaatggagccatacaacatgcaagttttcaacactagatatactcactcagcataatgcctttgagtttttgctcttatcaacagtccttttgtttgtgcagataagtaggattccagtatataaatgtactgctgtgtgtctaaccatgaaaccactgaaggacatataggttgtatctagtttggggcaattatgaatagaattcctctaaacatttgtggacaagttttaatgtgaacaaaagtgctttaaaaacatttataaacatttataggataaatgtctgtgagtgagatttctgggtcagtggataagtgtatgtttgccattatacaaacagaacactctttttttataatgcttatgtaattttatatttctaccagaaatgtatgagtgttccagttgctcttcatcctcactaacacttggtattgtcagtatatatttttaaaatttttaaccagtcgtacatgtgcagtggtattcatttcagctttaacttgcatttctctaatggctagtgatgaaggtaattttttgtggcttatttgtcacacatgtataatcttcagtaaaatgtttgtgtctttcatcattttctcattggatttttttttctgtttcttattggattgttttctattttatatgaactctgtatgaattccttgtcagctatattgtttgcaaatatttttccaagcctgtagatattttctcatcctcttaacaatgtctttcaggaagaaaatattttaaattttgactaagtgcaatttattgatttatttttatttgatgaattgttataggtgtcatgtctaacaagtgttcaccaaaatcttggtcctcaatatttccttatatgtatcttttttaaaaatttataattttacattaaatccatgattgattttgagtcaattttggtagatttagatcaaggtgtgagttttatatcaagatttacttatttatgcatagtgatatctaatctctagcattatttatcgattcaattgcttttatatccttggttgaatttgaaagtggctatttcttattttgctattctattcactaatctatctgtgaacccctccagcgacagcacattgtcttgattactgtagctatataataactccttttttttttttgggggggaggatggagtctcactctgttgcccaggctggagtgcagtggcgcgatctcagctcactgcaacttctgccctccgggttcaagcaattctcctatctcagcctccagagtagctgggattacaggcgcctgccaccacgcccagctaatttgtgtgtttttagtggaggcagggtttcaccatgttggctgggctggtcttgaactcttgacttcaagttatccacccacctcagcctcctaaagtgttgggattacaggtgttagccaccacgcccggccattttattctttttcagaattattttcgctattccagttcacatatatatatttttatatagcatatattttatataataaatataaaattattttggctattctagttaatatatattacatatttacatgtaaatacaacatatttcataaacataatatatactttgtatataaatataaatatattataaataattatataaatctgtaagtataagatataatttatattaaaatacaaatatatataatttatatattatatattataaatttatatatattatatagtatattacatatttatatgttaaataaataaaatatatatttatgtatgatatatatccataatgcttatatataatatatatatgcatatatttaaatatataaatatattatatacataattatatataatttcttacatatataagttcatgtatataagattcatatatatatgaataattttgcctgcatctagaaaacaatcttgttgggattttgataggaattaggttaaaccagtatataaatttaaatttgggaagaattgacagctttgttgtattgaattttctaatccctaaacacgcactgtatctctttaacttagattgtctttcatttttttcatttacaatatgcagcttttggcatacatacatagttagatttgcacaaaaatattacaccaattgagcaattaaaaatgatattgtattttaaaatgtatttctacgtgtcaaaaatacaatcaatttttgtatgttgattctatattctacatattttgttgaagtaacttatactttctaaagtcatttttgtagactgtattctagatcaaagtaatttaatgtcgacaacaataccaactcagttatttcagttgttaaattaactaagtgtaatgtcacaaatggcaaaaacagtttagacaatcggtcagaaaataaccaaagacctcatacccttaatggtctggatttaataataactacaaagtgcttaatatgtaagagtaggaaatagctaatttccctccagattctttattattttctatgtagaaactcatgtcatgtagaaataagcacagttttctttctttccaatctgtacgcttattatttccaattcttgccttattgctctacctagatcttccaatattatgttgaatcaattattaaatatggttgttgaatagtaatgataagagtggatggtattagtttccaatctcaaggggaaaacatcagtttttcactattaaatattacattagctgtaagtagcttttatagatgctctttatcaacatgagcacatttccttttatttctaattgaccaagagtgtatataatgagtgggtgttgaattttgttaaattagtttgtatcagttgataaaatcacgtgatttatttattctttgacatgataatatggtagattatattgactgagttttcaaatcatgaaccaacctggtattcctgaaataaacttcactgggcaaggtatgtaattaacatgtgttatgtatttattttgggggggcgctatgttttttggtgtgtgtatgtatataattgtttataattcttgttaaattgatccttttgtcattatgaaatatattttatgtctatattaatataggcaatccatctgtcttctgtttactgttcgcattgtttattttttatcttctcttccaaaacttgttgtctttaaatgtaaacggagactgttgtagacagcatatggcttgattgttgttttccttttaaaattcattctgccaatatctgccatttaattggataattttattcatttacatttaatataattacttgtacgataatatttacatctgtcattttgatgtttgctttctttatatcttgtcttcgttactcaatttttcccttactgactttttgtgttaaaatattttttcatctgtaccattttaatgcgttcatcgtttttttcttatgtatttttgagttattttcttggtgggtttcctgaagatggtcagtaacatttaattttataacaacctactttggattaataccaatttaatttcagtagtacacaaaaactctgttcctatatagctccatttgtctcttcctttgtgctataattatcacaaattacatctgtatacattgtgtgcacatcagcataaatttacaattattgctttatgtagctctcttttcaattatatagcagaaaaaagttacaaaaatatttgtactatattttgtatttagctatgtgattacctttatcagggttgtttaattcttcaaatatattcaacttactgcctggtgttctttcatttcatcttagactccttgccatattttttatagagtaggtcagctaatgattaactttctgcttatctgagaatatcttaatttctcctttatttgtgaaggattttaaaaaatatatatagaaatctgttttgatagggttttttttttagcattttgaatatgtcattctactgccttttgtctcatgatttctgttaagaaataagatgttaatcttattgaagatctcttgcacataaattgcttatctcttcctgctttcaagcttcttgttgtctttggcattcaacagttatgatattacttgtggataccctgaagtttatttttcttgaagtttgttaagctctttgaatgtgtagactaacgtttttcgtcatatttaggaaatcaccccccacagtctgaactctcattatatgtatattagtatgcttggtgttgtcctacagatctctgatgctctgttcatttttcttcattctttttattctttctctttctcaaattggatactgtcaattgatctatcttcatgtttgttacatctttcttttgccttcttaaatctgctgttgagtttgtctagtaatttttttcagttattgtactttacaactccagcaatcatatatacatatggatataatttctatatattttattatatatttatttaatttgtttaatgtttaatttacctactttattgtatatataatttctatctctttattgatattctatatttgttatgtaatgtcatgctttaggtttttaaacttagtttccttcaactaacaaaacatatttaaaatcactgacaaagtatttgctagtaagtacaatgtccatacttgctcaggttcagtttctatttgttgctttttttctatgtattagggacattttcttgcttctctacatgtcttaaaatttttgttgaaaatattttaaatattataatatgtcaactctggaaataagcttcttccttttttctcagggtttactttatttgctgtttgctgtaattgctgtttgtttagtgatttttctaatctactgttgtaaagtctgtattatttattgtgtgtagccacttaagtctttcattagttagtttagtggtcagctaataattggacagctatttccttaaacacttgaaagcaataattctcttggtttttgtttaaggtctctgtatgaacattgaggcatgccttcaacactcatccagacagttgacaattatgcctttctgcttgtacagagcctcaggtccagccagaggtgagtgcttagggccttctcaagtcttcctttattatacacatagccctatgtatctgcatgactttctggatttccaagaatatgtcacaacttttcaaagctcctacggatgtattattacccagcttttccttttaagttagtctattgtttttccaaactgtcatccatttccttgggcagccatagtgttaaaacatttgcctgtaaatgtttttgagaaactccctctgggatgaaatttctagtattgagtatcaagttaggtcaaataaagacaggatgttgtagtaggatcttacagggaactatcagacaagtcaaattctgacaatcctttgaccatttgttccctttggtactagaaatggaagctattgtttttcaaggctacttctttgctgaggactgggggatagaactagaataacttaaaacatcataaaatttgctgttaaactaagagtcaaccacttttcttctataaacactttgtgattattgaaagcctttaattaatttccaaagttccataaaagctgatcctgatcatatattttgccagttccttttctttggttttatgtaggggcaaaaaatttacagaagtccttactgcaccacttttactgacatcacccatttctatcaatttgtgcttcacacattttgtagctctgttgtttatttatctacaaggttagtattcctattaatttttgatagagggacacttttgccattatttaatattgctttctgccactggaaatattctttcctcaaaatctactctatatattaatgtaaccactcctttaattttctcttcatttctaaaggatattttctctggatatagaattcttggttgcaaattattttattttagcacttgaaaaatattgtgccactttctctggcctccctgatttctgatgagaaatctgatgttatttgaattttttttcctccatagataatacattgtttccctctatctgattttgagattttaactctgcttagtttttagatggttaatgtgttttggcatgaatttttttttgtttgttttgtttgggtttgcttcacttctggaatctgaagctttatgcttattgtcaaatctgagaaattttcagctactatttctcctagtactttttaagcacttacttctttttctagtccttcttggactctaatattagacacaaatattgaatctgttgttacagttttcataatgcaagttgccatttttctacctcctataatcaattataaactattttttctgcttttgttaaagggttcctcactttttttctagagctcacatttcatccagccccaaagccaatgctacatatttcagggttttgttatgacacttgcttttacataccaatttctatatgtgttccctcttaaggcataaccattctaaaattaaagacttaaaatcacaaccatttataacttttcataagtctaaaggtaagctgggtcattttgtttactggctctgctaatgtatctatggctagctactagacaaaccagagagtgcctggtatagagtagcatctacaaaagaggctggctgacttggctctgttctatatgttcttttatcctctatcaatatagctttcttttgtttcattagtggtggcagagttccaaaaattgctaaaatcacacagtctttgtgaggtttcgtcttggcactcacacactctcccatcttctgcatttcattggctaaagagattcacaaaactagttcacattcaaggggtaggaaaatagactccatctcttcgtgggagaacctacaaaaatcacttttcaaaaagagcagatatagtgagaaaaaagtaagtccactttcacaatgaacctacattatcaataacagtttggccaaaacaacaacaacaacaacaacaacaaacacttagaggccttcttcatgtggctgggtctcagacaaggccaggagctcaatattgaaatcaggttctgggaagaaaagtcagtggactttaaaggcgagagatgggtgttgcagaggttctttgaagagcgtggaatacacccaaactccaacatttgaagatacccctgatttgggttaccaacttgcaggtttatttaaatgcaagatttaaagcatagagtattgctaatgttgctgtttgcagtcctggctctctctggatgaaataatcaaagaagctcagagagcaagaggaaaaaaagcaacataaatagaggcaaaaaataagagaaaagcaataagcaagtaggctaaggcaaagaattcaagcccaagggtgtagaaacggtagtcgaagacctaatctgttagtatcctgatgcattgtgtggctgttgtggcctcattaagaccttcagtctccaggaccatataaagctggactgcatttggaatggtcctggtaatgctttctgaaaatacagtgtgttggcttctactgagagcctggagctgtcagttcctcaggagcttccagaggaattgggaatttcagtaggcttctgtggctaataatagagctagaaaacatatggactccctgcaggctaggagcccacaggtgatgcaaagaggacatcattggcttttgagagcagcagagaaaccttttattggaggtcacacagcaagatcatggatgttgctcagtgggtctgcactcatgggaagcatgtgatcatgggcaatgcaatgttttctggctgcagagagtctagaatcttaaaggtcctcttacccatcatgggaattcattccagaacattctggacccctctcaggggcaggtaagaaatgtctattcattgaaaccgtctaatgcattttggggtggtttttagaacccacttatttagtctgctgtgacctctgatagctcactggggactatccagagacaccatgaagctgcacctggcagcagatatgctcttgttctaatgagttcctcagtttctgctctagtggcttgagctatgcagcttaacgtaatggccccagacatggagggattgactgttccttctgtagagactccaagataataaaaacccatataaatggtcacagatccattcacagtggggttggatgtcagaaagcgctcagggccttggagcagggaagtcatccccaggcagtgggcttagtgaaccattgtcctagacgtggaacacattgtccttcttctttttactttagtttgccatttttataagaaaaaaaaaaaaaactgtgagattgggtcattgcctctgcacttctttctcaagaactgacatatccagtgcgaatgaagctaatgatgagagacaatattttaatgttaattagacattccatgtgtcttagttcatcagagaactattgctcttttatgtatcagatgaaagcagagttcttgcttggagaaaaacagagtacacagtcagaaaggagagtattttcagtgttgtaattattcaaatgattgttgctttttagaaaagcaaaagattttgagagggtgggggatacttagcaagaacacaactgcatgacaggaagccactgcaaagcctctaaaaccctcttctctctctttcagcaaacattgctaaaagctgtaatctccagttagaaaacaaccttgaagggagtttctcagtggcctcattagacaaacaagaggtggtaggaccaagcctcctttggaatggacctgcccagaaggaaaggggacaaaaggtacacagaaagccccctggtgtctgacggcccctggaaataataattggaaaaagaatgaaaacaattgcaatacttctgtgaactcaattgttctatatataaaatgaacatgttggactagctcagtgactctaaatgaaggctacagagttcttctcttctgtgacctctagggagaaaagtagagttacaatgttagggtagtgatgcttttaaattacatgtccaaattagctcctggcattgatgagaatatgttgtatctttctagtaggtagggacaggaaaaggtagagagtgtgctatttgattgtcctgccaactctttcattccttaatttgggaattagttgaccccatttgacaggtgaatcaatgaatagctaaattactgacatatataaataaaatattcatttattttcttttttttgcatttgtagttttggaacaattttacatttacagaaaagttgcaaagagaattcctatataaccttcacctacttacccttaatattcatatctttcatagatgtacatttgtcaaaacatttgtacactactattaaataattccaaactttttttgggtttcacattttcccatttatatcccttttctttcccaggatacaatctaggatactatgttgcatttaggaaatatttattttagtgtgtaaatatttatgctatgcattggtttgatggaattatgagtcaaagaatgatttatgatccccactttacacaacctcttgtctggaaggcataaccacatgtgcagaaacatcgatgcatccttgtccttagatcttcaaatcaacatgctaagtttgaggatgcacagtcagtgggaaggccttccctggaaaaccatgcaggcagtccatattggtgatgccagttatataccagctaagccccacatcctgactgcatggaaatgtggcaggaattggttggtgggatgctctgagcaggaccattcagtgcattggatgagtcagtcaaacaaattactactgataaaaagactcaaacaagttccttctcatcatgtattcaattttgctttactttcttctggttcttttggcattatgcagactcaaactgaagtgtgtagatatcatttgtcataaaaaaaaactcaaataaaactggtgtaacctttttcaaatggatctgctttgatggagatatgggaaactgggcacagcattgaactgctggagggtgaacaaattgatacattcttcaagattgtcatggactttttatagttcagtacatcaaaacatgcatactcgttacccaagttagccaaaagatattcacaacagtgttgtgtataataacaacaaattagaagcaacataaaagtttggccaagattctttaaacaaattatagaacatgatgcaaaatcaatatgcagctttaaaaaaataacattgaagaatatttaatgacacattctattacaaaaatagaagattaatgtatagtataattccttttttcttttttttgagacggggtctcactcttttccctaggctggagtgcagtggcacgattttggctcactgcaacctctgcctcccaagctcaagcgatcctcctgccttggactcccaagtagttgggacacaggcatgtactactacacctggctactttttgtaattttgtagagacggggtttcactatgttgtccaggctggtctcaaactcctgagctcaagcgatcctcccactctggcctcctagtgtgctgagattacaggtgtgaaccactgcaccctactgtccttttgtgttatatatacatatataaaaatatttgtatcttgaaagttatttttactaaatatattaacagtgattacctctgggagcagggagcttttgaacagttttattgagatataatttacataccttacaattcctcctgtttgcttattctagacattttcaataaatgaaattatacagtgtgtggttttttttgtgactggcttctttcacttagcacaatgtttccagggtccatccatgttatagcatgtattggtaattcattccttttttgttgctgaattatcaagttttgttgtatggatataccacattttatttttccatttatcatttgatggtcatttgggttgtttccactttaaggctattataaataatgctgttataaacatttatgtacaagtttttgtgtagacatatatttccaattcttttgtatatatctaggaggaaatttcagggtcatacggtaattatattgcttaactttttgagaaaccacgagattgttttccaaaatggaagcaccatattacattcttaacagaaatgtatgagggtgtcaatttcttcacattctcacccacacttgcccttacctgtcttttagaatatagctaccataggctgtgaagtggtatgtcattgtggttttcatttgtatttcctcaaatgttgaacatcttatgctgattgataatttagatatcttttttagagcactgtcagatcccatttcaatttataactgaatttttatttgttgattatttagttttatgagttgtttatatgtattctgtatatcctgtatacaaatcctttatgatgtgtatgttatgattttcaaatattttctcacattctgtgagttgtcgtttctctttctgaatggtatcatttgcagcatggaaacttttggttttaaagaagtatatcataatgaagtataatttatctatttttcttttgttccttatgcttttggtgtcatatctaatataccacagcctcatgcagatagcaaagattgacttctatgttttcttccagtaattttgtagttttagctctttttttttttttgaaacagagttttactctgtcacccaggatggactgcagtggcataatctaggctcacagcaacctcagcctcccacattccagtgattctccagtctcagcctcctgagtagctgggaccacatgcgtgcaccaccacgcccagctaattttttgtatttgtagtagagacagggtttctccatgttggccaggctggtctcgaatgcctgacctcaggtgatccacccatgtaggcctcccaaagtgctggggttacagacataagccaccacgcccagcctagttttagctcttacatttaaatttattttccatgttaagttaatgtttgtgtgtagtgtgaggtagacgtccaattttattcttctgtatgtggaaatccagttgtcccagcaccgtttgtcataaagagtgttcattctccattgaatgatcttggcacccttgtgaaaaatcaagtgacttcaaatgcacggctttgttttctggattatcagttctactcctgaagtcagtaccacactgtcttgattactctatctttgtagtaagttatgaatttgggaagtttgagtcatcctactctctttttctttcccaagattgttttttctattctgagtcccctgaatattcgtataaattttgtgatcattcctgatcataattttctgcattttctacaaaatggcagctgaatttttacagggattgcattgaatctgaagaccaatttaggaaatattgccaatattcagtcttcctattcatgaccatggacatctttctgtttgtttagatcttctttcattgttttcaacaatgttttacagtgtttcattgtacgagtcttgtacttttttgttaaatttatgttaagtattttattctttctgatgctattataaatataattgtttacttaatttcattgttagattgtttattgctagtatataaacacacaaatttttaaatactgatcttatacaatgctatattgctgaactcatttattacttctaatggggcgtgtgtgtgtgtgtgcttaagagtttctatgtacaagatatacaagataacttaatctgcacatagtggtggttgcacttcttccttttcaatctcactagaatctccagtacaatgttgtatagaagtggcatgagcagacatccttgtctcattcttttcattttctaatttttggcccggagtaagaaagcattctgcctttcaccattaatattgattaataatattgttgattttaaatttttttcttcttttccttatatgtatttgttattttttaaattttaattttagtatttttaatttttttaaattttttatttttagacacagggcagtggtgtgataatagctcactgcaacctggtctcaaaccatcttcccatttcagcttcccaagtggctgagactataggcacttcaccccatgcccatcagctaattctttttttttttttttttgtagaaacagggtcttaccatgttgcccaggttggccttgaactcctgtcctcaagcgatcctcctgtttcagccacccaaatgcgggattacaggcgtaagccacctcacccagccttaaattttcaataatttgcaaatcatattcgtaatataaaagttagtaagaaaaaagaataaatgtcccagaccatagcagttcatcttaatggaggagaaaggcagatatgagagaagggcctgaaatacacactgctgccatggggggggtcttctgattactcagagtctctgcattttagctttctcactgatccaaggctgccagccagctaaggaagtagatggagagaggaccaggagcaccttgtgaatttcataaccaagccacactttctaagccaggagaaaggggagaggtgaccccagtataagaaaatgtatgttataaagccaacggtcactcatagaatgtacacaaccaagagtgatccctaactaaactagagacgttaggtggttataacacgtcactgtgggtttatcggttacaaggaatgtaccactctggtcaattctgtggataaaggagatgccttggagatcgaggaatatatgtgaactctctgcatcttcccttcaattttgcagtgaacttgaaactgctttaaaaaataaagccaatacataaataaataagtaaacaaatttaagcaaaagagatggtgataagcaaaggaattgggtgggtcttacatcgcaaacctttctaagcacaccctaaaataaggctttaagtttaagttgctcatttgggagttgaccccaggaagcaccagtaggggaaagaggaaatgagaccaggaatgggaacaagccaatgtggagagttttgatgtacaagatatgatggggggtctaccggggacccctgggagactgtgtaaaacacacctcagtgttgtcgtcccatctgaggggcaaggaagctggggtgtttgtcttcaatggccactggcttttcactgacacaggcagggcatgccttgcctggcacagtaggcctatctcatgtgggagctcgtcgtgctcttgcggccatggaaagcccacctgcagagtcacagagacctgcaatagaagctctactcatgttcgggaaccgtgagccctgaagggaaatgctctccactaaaggggtaatctatttttgtacaggagttctctttaaccagataactttttagtgaacttaaaatataatatgattttaacatttcagattagcacactttgtgacaaattatggcactcccaaaagagaaacttctcatccagtgctaactcctttccccattcactgtattttgcatggggccaggaataaaattccatggggctcttcacaattttgtggaattgatcaaggaaatacatcgtggtgtccagatcacacctgggtagttggcaaatgtgaatctgaggccaggtttaggagtactgggaaaggttttaatggaaccaagctcaagcactgtgcacagaagctggggtgaggagagggggacaattggggggcaggcctttgtagcctcttttgaaaggagactgcctgtggcctgctctgcaggagccccctccagaatcactcttgatgatcatcagggctctttattgacaaaaactcagcccaaactcacataaaagaaaacagaatctactggtttatttggttggaaagttcaagggattcctttggacagattcataaacaaagtgtctcttcctttctcagttctgctgcttctgtgctggtttcactctcaggcaggttttcctctgatgtgttggtggtcagatcgcagaggccaaggttctgcatccactgctggaggaaagagatgcggtcagcctcacccaacccacgtggagtgaagatagacaaagagccctctgcaaaggaaaattggagtgcagctgccagacgcaggagtgatcctgggcaagtgaaaatgatgaagtcattgtcaccatcaaagtgagtgtagacatgcctctctgcctgtagacatgctcttctgcctttaagacacacttaagttattctttatttattaactatacacccccctgacaaccacacacacatacacatgcttaaaccaattgttatgatttgtctgtgtcctcacccaaatctcaccttgaattgtaataatcctcgtatgtcaagggtggagccaggtagagataatcaaatgatagaggtggttccccccgtactgttctcgtggtagtgaataagcctcagacatctgatggttttataaagggggattccactgcacaagctctcttgcttgctgccatgtaagacgtgtcttgcttcccttcaccttctgccatgattgtgaggtctccccagccatgtggaactgtgagtccattaaatctctttcctttataaattacccagtcttgggtatgtctttattagcagtgtgagagcagactaatacaccagtgttggggctcagaaagcaatatccgaagtatagcattttgacatgaggaactgaaagttccaatgtatacatgttcagtaaatttgcatgccttttcttctactaatcaatctgcctcatgccagtgaggcaaaaggaacaaaaatgaaaatactacatataaaggcagttcttagaacaaaatatatatttttaaatatttgtgttagagaaagaagcctaaaaacttatgagctaagtgccatattgagaaagataaaaaataaacagtattatccaggcatggtggtgtgcacctgtagtcccaggttcttaggaggatgaggtggaagggtctcctgagctcgtgagttcaaggctgcagtaagccatgatcacaccactgcattccagcatgggcaacaaagagagggctcatcttataaaaaagaaaaaagaaagagcaacagagtacattaaagaatatggaaagaagaaactaacaaaggtaagagagaggactaatgaaacagaaaacaaagacacaatgaagaaatcaaatcttatctttttcttgaaaagatgataaaaataaacaatcttctggcaagactgagcaaagcaaaaacagatcaggcacaaataattttaggactgaaaaaagagacataactgcagattttgcagagatgtaaacaatagagaatacttggaaactttatggctttaaattggaaaacttagacaaaagggaacattttctagcaaaaaaatgaaatctgaaaactgactcaagattagggaaaatcttcactgtatatatgtatatgtgtgtgtgtgtgtgtgtgtgtgtttatagtgaagttttgtgtgtatatatatgtatacacatatatacacacacacaaagaacttttacaatcaatattattatttatcatattaataatacccttgattataattataatgatatataattacattatcattaatcttattattaaataagactacttaattttaaaagatgagcaaaagatttgaacacacacttcacataggaagacacacttgccaataattaataagaagtactcaaaattagtaatcctcaatgaaatacaacttaatataacaatgaaatacaacttaatataacaatgaaataacatttcattcccagtggagtggctaaaattaaaattctatcaccagatgttggtgacgatatgtcacaactgaactctcacacattgctggtgcagtgtaaaatgataaaacatgataaaattatttggctgtttcatataaagttcatcatgtacatatcgtaagactaagcaaatccactctgagatatttacccaaagagttaacaccactgttcatgacagaagtacatataatagtccaaagctgggaacaacctaaatatacgtcaaggggaaagtggcaaaaccaattgtatatattcatacaacgtgacactacttaggaataaaaagaataaactactaatacaccattaatatggataaatttcaaaaagactactttgagtataaacagcgagatacaaattaatccatattatgtgatcccatttacatgacgttctagaaaaaacaaagctaatccatgataaactatttcttagcagtggcagtttgcggagagcatgaggaggcaatgactggaagggtgcatggagaattttcctagtgatggaattattcaaaatttttgtggaaatgtgggttatgtgggtgtatgcacttgtcaaaactcattaaattataaacttaacaataatgcattttacgatatatgaattatatcatagtgaaaatatcttaaaaactggcccaataaagataagcaaaatgaatcagtggctaaatatccacaaacgcctacacacacatgtgcatacactcaactagcaaacaaataagcctaaatggttctacaaagttctaccaaacattccagagatggattgcctcagtcttgttgattccacaagatggggggtacttttctccacactaaaatcaggagttcatctgccttccagcatgtggggtggctgtagggtaggaagacctcagagaaagaaggagaataaaacaatatgaggctggaggacagccagggccatacctgcgggtcctagaaacatgggcagcagacattgttggttgattaccgcagagttcttctgatgtccctactttattgctaataaaaccctatttttgttcaggtagaaggagaccttgagaatgagtgcatgctgggccctgcctcaatcccagaagatgaatcttcatgagtctaacttacagacgtgccattctctttgccatgacttgttttaaagaaaggcagctgacaaaatacaggccaaggggatgtgaatgaagtcccatagtggaggagtggtagtggctggtgggactttcagaaatgtttcctagactttaaaaagggaccaagagaagggaattctgtcatctggctttgagttctgccatgtgccagtgtggtacttggagttcttgcagagatcttcaagccaggaggaccagtctaggggacaaaacccacattgaggatgccaagaaagctagaagaaagctactgaaccaccaaattaaccaaatatgcacacttcttctggatatttacataagagcataaatgttcccaagtcattcttaacataagttgatcctgttcccttatcactcgctccccaaagcactctaaatacttccctataatagggatttgagtatttacggtaagagcaaagggaaggtactgacaaattttaaagaagggatgcttgaattacggtttaaaatgatcactctgcctgcagtgtgaggagtggactgggtgagaagaaaatggggagggggataaggagccaatggaaatactctgcagaagagatgaaacatatgacatctaagaccctggtggtagaggtgatgatggagagaagtgaatcaattcacatatatttagaaagaaaaatcttatatgttgcctcctccagaaagccttccttgattttttttttccaactggatccctgctgcattgaactctccatgtgttaaatcttccaatgaacgttgtgtggacttctctttagatactggttctgactcagggcattcaaacatgttcctcccagaagactaggagccccctgaggactgagaccccattctcgctcatctctctttccctgagttactgatccctggcagccactcagccatctgtggtcagctgagctgcctgccttgcctggaggaacgcaggtcccacagctgcctctgtccggcaggcaggcaagttgtaccttcagttttcatccacccgcctgtccatctgtacctaactcatagggagctgacatggtgctgtgtggaaacaaaccgtggagcgaagggcagtgaggggcaccctagccctccatgcatggctgcaaatggggagactcaccctgcctctgccaccttgagaaaattactgttcccctctgagcctcagtttatccctctgtaatgcaggtggaggtcggagagtggttattcctcaggattgaccgtctggttgaggtgtggccttccttccacaacaggctcccaatcacgtcctttcttccttggaattgatttctactgcaagaagctggagagagttacatgaggaacccactgacagatgacaaaagcaagcctttgcagagcacttttgtttttctttctctacagattcacattgtgcgtgttcagtgagaaacagaacacagggctgttggctttggagggctgtttattttgaaaatgcaggtagatggtgggaagggtgatggagccattcgcagacaatagccattgtttgtgcccagacttcgaagtggctgcagggctgtccttggcctccccttgggtcccatgacacctggggagcccggctggacagaccctttgcaggttgcctgactctaagacataccagaaggacataaataatcagccaccgactctttcgctcgactataaaaagcgtgcatatgctctgcgcaggttttcctaaggtaagggacagagctgggcaaaaccgggcttctggagctgcccatatggggaggcggtctttcaccgacgattctgcagacagaaattgcccatctgcactgtttgcaggtgttttgaatgattatattattagctctgtctgttcaactttgcttttttatggtggctttagtattgcagtaaaaaaaaaaaaaaagggaagacgaagaagaaagaaaaaagaaatataaaggcagccatctggttcccgatttgtgatcgtgttctctgtcagtaaagaggggagaggcagccactgctctctcggggggtggggcaagcacagggcagcccccagttctgcccttttccaggagagtgggatttggggtaggcaagatttttcattttaccagaggaagctggtttattttctaatttctcctcccccgcctacaccttgatgctttgcagctgctgcggagctcacctgggtactggaatcaatgattgatgtgtcccccagagctgcagcctggcctggagaactggctgtgtgtgtgtccgtgtggccccggagagtcaggctggggctgtccatcccacccatgactctgggccttaatttgatctgtgctgtgacctgtgaaacttctcagggcatcccgactgcaggtagcaagacaaagatttatttgattatctgtgcataggtaattcatcagggaaatgctctctgtgtcagatggcgcagaagcggggttatttagggttgtgcagcgcatccagggctgggagggtgccaggagccaccagcccagcaaggtcatgacgcctccccgctgcaggagataccaggcagatccggagtcacacttgagccagaggatgctgtctgccttttcattggcttgggcaaagagaagagaattgtgtaggatttctttcccccataaaagggcagaaacaatgctccgatgtaatctgaggaagccaacagggggtgctgacacccaaccttctcttctcttcaggtaccctaccctagggacagacaaaccatgacagtaaaaagtattctatagataagatatattctaccctatatacatatacaaaactacacaatatatatacattgctcttgtgacctgtctcctgcaacaggcaatcatggtgacacgtggattcatttgtcagttcagtgaaagaagcagcatcagccatgggcctcttagagatccagaagccagaaggaggaggctggaggaaggctccagagaaaagaatccctaaaaatacactcccctgattgtagaactgtttccatttggcatttctgattgcaacgagcagaatcccacccaagcatgcagcaggaaggcaggcttcttgggtgttctattagggtgggagctgaatttggatctttgcattctctccccactgcatctcacttcaagaagtgaaccaggcagtttgtatttctttctgtggggtacaggtgcagagcttacagcagaagctgggaatgggaagaaacccttttcctttactttataaaagccgaagccactgaagattgtgtccacagggttcctgaaggaatatggatctgtggaaagcagcaagggagagaaagatcgtcctttaacctaggaagaggaccgaagccagagcctggggtggtcagcactctgccctaggtccttgtcagtgcctggagttggtaggacattggaggtgatggatccatggtgcacacggcatggataaaaccaagtcttgtggtacccagccatggcaattggttatgtgagcagcagaatttatagacatcaaaaactatataaatgcaggtaaccactgtagggagaagaaaggtggggtggagggccttcctgggacattttgctttgcataacacctcacagtctttgcctgaccctgaaggagtgggtaaagtaaggagctcctcatataccagaaatggtgccttcttattgaatgaagcgattgtaaatcaagggtcgaatgtctttgattgagtaatagtaagaaatgagatactttggcaccattgagcttggagctgcaaattcacatctgtagaggcgtttgtggggtgtcaaaggaaagtttaaagaaagacaagatcaggagccacaatagcctagagtgagaaaggaggtcaaggaagccccaaaggcctcagcagtacaagtctgggttttgactctgtgatccatggaagttataggtgtggtgccaggtttaacatatacgagtgctattattatgtaggccaaacaagccaaatgctggtcatttcagactgttcaaattgatagctgagagtgcacctttgggattcagactgcctgagtttgaagtttatcacctttatttattagctgtaaaatactttgcctcccttccttcctgccttcctgcctgccttccttccttccttccttccttccttcctttcttccttccttccttcctgccttccttccttccttccttcctttcttccttccttccttcctgccttccttccttccttccttcctttcttccttccttccttcctgccttccttccttccttcctttcttccttccttccttcctgccttccttccttccttccttcctttcttccttccttccttccttccttccttccttccattctggttagcctccctctcttatctcttattccctttctccctccctccctccttccttccttttttttgcctcagtttcgtcacctgaaaaatcaattttataatatttgcacctgctgcaatacacctgttagaggattaatacagatgcacaagactacctgccatgcaattggtgttcaataaacattagccagagctattctgattgttgttaccctcagtatatctgcttccttcctttctctatactgagagttagtatagcttagagttaagagaacaacatttgtagccatacagccaggattcaaaacaaaatgtgtgaattatttaacattattaatctcatcttcatcatatctggttgctgtctttacttcttccttctgagtaaggcttgtcttgggcttgctgtggtcccagctcatcattggtatagaaagaggaaagaagccagggccttgggtgatcagcactctgccctagctcctcagcagtgcctggagttggtaggacattggacggagtggaagcattgtgcacatggcatggatgcagccaggtcttgaccctcagccccaccataccaggcatcttgtttcttcactccacaaggatcctcttagcagggcccacactccaccagggacaagaaaggactagaaaattttcctgtaggtcaactcacccagagcctgagcagagaaagcagcagcttctcccaagcatggactcttccaggagagatatccttgcgggatgcttcacctgctcccagttgaccaagaggctagagagcctgtctttggtgtgcaggttcccttaatacaccatggaatactatgcagccataaaaattgatgagttcatgtcctttgtagggacatggatgaagctggaaaccatcattctcagcaaactatcacaaggacagaaaaccaaacaccacatgttctcactcataggtgggagctgaacaatgagaacacttggacacaggaaggggaacatcacacaccggggcctgttgtggggtggggggaggggggagggatagcattaggagatatacctaatgttaaatgacgagttaatgggtgcagcacaccaacatggcacatgtatatatatgtaacaaacctgcacgttgtgcacatgtaccctaaaacttaaagtataataaaaatatatatatagaaagaatttttatatcaataaaaaaaacttttctttattttcaacttctcaatgaccacacgctcctatatttcccaaactcccctgccctctgcaagctatctccagaccttcccaaaaggtggacctggaggtttgaacaggtcctcattagcacatggctttgctccttggtgtgggcaggattcttgttaactgcagtcgggactgtgtgcagcatgcttaggccaccccatccatgggtcacccctgggctgtctggtcagtcatgagtctgccctcatctcctcttctcttctgtggccatcagggaacacacctggctcaacctccccttctttatgtactccccttctctctccccataatctctgggggcctgtccatattcccttgaagtcactaattccaattagaatcaacactgaaaactgctttataatctattccacttcagaattctcccactgaacaatcctctacactcagcaattttcatgtttttgacttcttattcctagggcagaaaatcagattgatccaagtcatctactgagatgccctctcctggttctcgaatccgcctccagctaaagggtggagttccgtggagcaaaagaggctgcctcacagtgcctagctagcaggggagctgggcagggagatgtctcccacaagtctgcacagggctatctctggtcctggggccagcgtgtgcctcagcatttgtcttttacacataagtggggtgggggaaacccacttctttataaaggcttggaaagaagtagagctccactgtgcaaactcagccacataaaagcaaaactagtccagaatcctcccctgcttcagtgtcctgaaacttcacactctcctgagtttcttgcacaccttgaggtctttgggttctttgaatggtggcccaagctcaaatgacctcagtgaagcattctatgatgccaagtccagggcaggttttatttatttattttttattatatgctgtcttacagccatgacactttcttgaagagccactgtgtctttacatttacacgttcctcactcaatctttttctcacccatcacatttctattgaagccctgttagttgctcttccaaagatcaagccactgcgttcacgtggtttacaatctagaggaggggatagggcagaggcctgtggaagagagtgctgtttcatgcagattggtcagcgaggcctttctgacaagttgaccccacagcagaagtctgaatgtagtgaggttgtgagctacaaggatacctggggaatgaaacttctagccacaggaaggagaatatgcaaaaggtttaagacagggctcttttggcatatgtgaaaaacagcaaagaagttagtatagtggaagctgatgctgagtgagtgagaagtgactaagagtcagacaatctagggccacataggattctactgtgaaagacttgggggccatgaaagagttcccacagaggaggagtaaggtctcacctcagtcttcatgggattgtgttacttcagtgctgacagcaccagttagaaggtcattgtggtaatccacttagaaaacaatggtaccacttctgtaatcccagcactttgggaagccgaggtgagtggatcacttgagttcaggagttcgagaccagcctggtcaacatggcaaaaccgtctctactaaaaatacaaaaattagctaggcatggtggtaggcacctgtaattccagctacttgggaggctgggaggctgaggcaggagaacccagtgaacctgagaggcggaggttgcagtgagctgagatcataccactaaattccagcctgggtgacagagtgagactccgtctcaaacaaacaaacaaacaacaacaacaacaacaacaaaacacacaagaaaacagtggtatcttgcagtggtaatgcttgggttggattttgtctttttgaggtgggatcttgctctgttgcccaggctgtggagtacagtggtatggtcatagctcactgcagcttcaagcatctgggctcaagcgatccttccgccttagcctcccaagtagctgggacaacaagcacataccatattttttgtaaaggtctcagtatgttgcccaggctggactcaaactcctggcctcaagcagtcctcttgcctcagcttccgaaagtgctgggattacagacatgaatcaccacacctggccagaattgatccttttattgttttcagctactgatttgaagaaatttgttacagaagctaacatgaatttccctgactaataaaagcagtctacagaacagacagggttcctgccttcagggaacttactgcctagatgggaagacagatattaatcaaaagtaatttcttgctcaaaatccaatgaggattagacagctgtcttaggaggtttcttccaagtggtgactcagggattcaggatctttctacattatgcccttaacatcttggattcttccaggtccatccaagggaaagggggaaagagagtaattcaagaaaaagtatgagctagagaatattgtaagagtgttttaggggcaaaatctagaagaggtgtgcatcacttttggacatcacatttcactggacagaatcagtctcatggactcaacctttctgcaaagaagcctgggatatgtactcatcctagaaggcaaaatagttcaagggatgaagccaggcaaaagtgcagcttcagctgaagtctagccccagcctgatctgaaactccagagagtgaatagcatcagaattgtcctattctgaggacagggtctagtcttctgtactcctcgtcagtcagttattggcctttgagcaccctagaagaagggtataacttccaatgtgtttcagaaaaggcttcccgtcagctaaggcaagggttctcaaccaatgcttggagatatttttgcttgtcaaaactgggtgtgggggctactggcatctagtgggtagaggctagggatgccactgaccatactacaattcacagactagaccccacatcaaaaaaaaaatctggacccaaaatgtcaatggttccaaggctgagaaatcctgagctaagggcagtggtcaggagaagaggacagctatgagcttctgggagtcatgctctatgaatttgggagatgggtgcacaggccagggatctgggtcgggtgcccacagtgcctaacctatggccacagaagaggaaataggagtgtggggcctctagtcaatcttggacacactgttcgactccagttctagaacagcaccttgcacgtggtcagcacccctgacagatttgggtgaatatgcatttttacaactcctgggctccaggctggcacaaaccttcaacctagataactgacatgatggttccaaagaaggatgcctgggaaaacaactctgaatagggcagcctgatggaagtggttcttctgacaccaggatctcaggttgtgctatgcgatttcttctcttatcctggcaattttagtggcaaatgctatgtgattggggctgctttagacttcagagaggagtactagatttagctgctgagacctcaattctgctactgaattataatgactgcatgagcagaccaagtcttctcaattttaggacgctgggttcttccatttctacaagaacactgtgcacttccatttttcttcaactgcattctaaagcattctgggttctctgtgatgtcagtgccaacaaggtcacttctgggggaaaagaggcagaggtgaggggtgaactatcccagcccctgtataggcactaaccagagcagccccacatttagctgttttttaaaatatacattagggttccacatgagatttttgttccatataaaaattctgctgcaaaaacttgaatacctgtgcattggatgacatggaagttaccatggggaacagagacgtagtgcctgccctagggacttacatgcatgtgttcaccacaggccataattcaaggctggaagagtgagggatcaataaaagagtgcaaggaaatttgctattccaattaacaggattatttgcatatatccatttaatttaacagtataaactccgctgtgacagtttagaaaattgggagttatccagtgtggtgccatgcaactctgccataaaatcatttctcttctgatgatccttttgtttcttactattaggagctgcaagtggtgagggagatataatctattgttctataactatccacttgcccttgcaagcctttcacttatgaccaaataaagacaaggcctgatttctgtatataagcttcttaaacttggccaggcagggtggtggttcaggtctgcagtcccagcactttgggaggttgagttaggaggatcaattgaggctaggagtttgaggttagcctgggcaacatagcaaaaccccatctctcaaaacaaaataataataaattagccaggcttggtggcatacacctgtagtcttagcttctcaggaagctgaggcagaaggatcacttggacccaggagttcgaggctgcagtgagctataattgtgctgctgtactgcctgggcaatagagcaagaatctgtctcaaaaaaaaaaaagaaagaaagaaagaaaaaaagttcttcacactcactataagttaagcctcaaaaattctattgacttgaaaatggaagccccattctcatgggggtcactaagatagaaagagaaggatatacccaaagagccgttttctcactggatgcgagaccagagctaaagccctcctaggctgcctacattctgaccctcattgcattgtctgggcctttggaagtcatcttttttgggatttctgagcaggatcctaagaggtgctcattttagctgaagcaggatttaagaaggctgccacttagaatggagattagggttgggtttgccatcccagatcaaaacaacagaaaagaagaaatagattaaagaactccatggtttatgttaaaattgttgaactgaagccatgagacagacattgtctagcaagcagacgctgcgggcctgccttaaattatacaacctaatgtcctaaaataagcccagattcagattccaccctccttggtctgtctctctcttttcttctctctctactcatttcacctcattttattcttacaagcatcttaggagacaggtttatttttcctcccactttcagagtgaagaaaccgagacttagagagactgagtaacacgttcaaggtcacacagctaataggttcagagactccatcaagattctttccaaatagagattccaagagccatttctgtattaaataatcagttcgctcctcgtttgtggagcatgaaaaccctttagacttgccgtcttttgtgcctttgctcaagaaggccatgcacttggatagctccatttcatccccatgaaacccatctttctagaccagaggtccccacccccaggccacggactgcttactggtccatggcctgttaggaacgggctgcacacaggaggtgagcagtgggcaagcaagtgaagcttcatctatatttagagccgctccccatcactagcatcaccacctgagccccgcctcctatcacatcagctgcggcattagattctcaaaggagcaggaaccctattgtggttccaagatggtggaattgagctatttgggttgaaccatttgaagttgccagtaatctgccattttgtaacctacctattgtgcgagggatctaggttgcatacactccttatgagaatctaatgcctgatgattggtcactgtctcccatcacccccagatggggctgtctggttgcaggaaaacaagctcagggctcccactcagtctacatgatggcaagttgtgtaattatttcttcatatattacaatataataataatagaaataaaatgcacaataaatgtaatgcacttgaatcatcccaaaaccatcccctcccccatctgttgaaaaactgtcctccacgaaaccgatccctggtgccagaaaggctggggatgctgccctagaccatttcccagggcccttcctcagacaggaaatgactccattgttacaacctcattttgaaccgttgtgacgtcagctgtatccacctactgtgagaacctctgtttattgcctcacgacacactggtctctaagtttcctggaggccagtgttgtgtttttgtatttaacacagggccccatgtgcattctgtaggtctgggtaacgatggtggaattgagctatttgggttgaaccttttgaagttgccaataatctgcccttttgtaacctataaaaactgtaatttcatctgattcaaaataaataaatcacatttttctgcattggggtttatgacattaggaaatgattctgaactttatacagtgatatgtgctcatttgaatatgttcaagatactctaattataacatcctgttttagggatgctatgatttagggaatcataggttttgctcttagggttttctgtttgttttagttatttttaaaaaattaggaaaagagtcttgctctgtcacccaggcaggagtgcagtggcaccatgatagctcactgtagcctcgacttcctgggctcaagcaatcctcctgccttagcctcctgggtagctgggactacagtcatgctccaccaaacccagctaatttttaaaattttttatagagatgggggtctcgctatgtttcccaggctggtcttcaatctcgggcttaagcaaccttcccacctcgaactcccaaagtgctgggattacaggcatgaaccaccatgctcagcctactttttgtgttttacgttcaacaccttaaaatgttaaagatacacagaaaagtagagagacaggtctaatgaagacctagactcactccttacctgtttcaatgattatcaaattcatgaccacatttgcttcatctctatcccacccacttcccctctccttcatcccaattattgcaaagcaatataccaaggtatcaagccactggaaaatagttcagcatatgtttctaaaggaaaaggaatcttttaaaaaataaccaaaacattttaaaataagttaacaatgtcttagtatcatctaagatgtatacacacacacaagcataaaatcaaataaaatacaattagacaagctatactttgtttcagggagggagtaaggtccacacattgtgtttggtagatatgcttcttatgtttcttgtaatcttgttttccttcctagctagtgctttaatcaaattagttctctgaagtgtcccattgactttggaggaaactgaggccccaggaggttaaatggttgtgcccaatgtccccaagcaagtccatgactctgaccagggatggagtccagatgtttgagagtgttcaactttcctgccccagccccaaggcccccgcccaggcccactgaggagggtccaaccccgggtgccccggacccatcctggggtcattggaatgccctctgcagatcactacttcctgtttgcctttccatgaggcagtgaacactgctgtgaaaaaggttcaaagtgtttcctgacacacaaagcctctaaaaggcaatattttgatgatttaagtataaatgatcagaaacatgtggatttcatttcctttagaatacacttgggtatgaaaattaacaggaaacgtgcttggcaaaatacaacctgggtttcctcaaagccctgaagtggtttaagatgttcagtggatttgaagggaaggtagccttctctctgtaccttcccaccaggcttgcactcgcccacacattaaatctgggcaggatttgctactggtgtggccttgaccttgttgagaaaggcagggaggaagagaaacaggagaaagaggagggagagtctgggtaagaagtaggcagcttttcctaactggtgctgccttcccaagagggggacctgacctctttccttggaaacagccctcaacaagtccctactgggtcctacctgtcctcaggtgtccagccatgctttggccccctctgtccctttccctgagaaaaaccacttggagttacagaaagacatggcacactccacagagaggcttctttccatctttacccgtgttaagataaggttcattccatgatagaggtaggcagcttcagagctcccagaagtcccagagcacaaggcagtgaaagatcctggtagagcaagaggagatggagaaggagaacctgagggcaggagaatgctctggagggagagaggagagaggaggaaagggaagaataaacggagtcagaaaggaaggtaagagagggatagggagactagagagggagaaaagaagggaggaagggtcgggggagggaagaagggaggaagagaagaaagaagagaaaaaagaggtgagagggaaggaggaagggagggagagaaggaggggagacgggagaaaggaagagcagaagggaggaatgagggaaggcaggcgtgagggagaaaggaaaggaaggagagggaaggagaaaagaaggaaggaagaaaaaaaggagggagggagagaagaagggagggaggaaaggagggagagagaaatggggggaaaagaagaaaagattggagggaaggaggaagagaggaagacaagaagggatgggaaaagggagggagggaggaagataaaaagaaagggaaaaggggaaaaagggagagggagaaaagaagggaaaaaggagatatagaaaagagagggaggaagagaagaatggagagaggaaggaagaatggagagaggaaggaagaaaggagagagaggagggaaggagtagagcagaatagagggaagaaggatagcaggagggagggaggaaggaagaaaagaaaagatgtggggagagagacagagaggaaggaaggaaaagtgtgtgatggccggtgggaagggtagacaaaggatagacacagagataggcagtggattcctggttaggatttctggctctcaagtaatgtgcttgtcagcaagaatgtccagaaatgcccctttaactgggcgtactgcaaaaagtgtgagaagcattctgggagtgggtgggtttcacgaactggggtagtcttcctcactctgcttttttgttttaatcatcagtcagcagaaatgtctccagaggccttgctgcttgccctgattaatgaacttcagatctttctgtgccctggggttctgcccatcatgagcactgggcgggatcctaacaccatcactcctgggaccagttttcataagtgggcctgctaggcatctgcaggcagggcttggccacctcccaggagccaggccctgctatgaggtagcctgaggacaggacagaggactggaccacaaaggcagggctttccctcctggggacacacccaggacaggaacacttttcctggtggaactgtgtgggcagaaggggcaacatgaccagggggcaactggaccagaaagacagggccaacaggaccagaaaggcagggcttaccctcctaaggacacagccaggacagaaacacttttcctggtggagctgtgtgggcagaaggggcaacatgataccctcagtaatatgcctgcctgggtcaagatacaagtgacttggtttggggttcccctaaaacagagcgcaagataaggctttgagggcaaggagtttatgtagggggtgaccacaggaagcacagagagggtggggagaagtgagacagagaaggaagaaaagccaataaggtcttgttagtgaggaagttactgcagtgggcaactggggcccaacagcacgggtgttcctctggcagacgctatgaagaatgcgcctcagatggtcccacagaaagataaggagctgaatgtgcatccaccacatcctgtcccctgctggtcaggtggctcctgtggctgtcacctccctcactctctggtcctctccccagcatgctccctaggccaatgtagtaagttatgagcttaaatgggaactatcttcaagctgcttctagagtatgctcagtagatcttggatcccttggataggaatcttggcagggtccctataccagtcccacccttgaggaaaacatcgatactttgcccagatgaacaggctgaaagctggtgagtgaagggtgccaagtagcagaggcccataattgcacctgtcctggcaagagatgagcaatgaacagtttatcaagcatcgcccagcatgcaccaagcacttatgggcccagcacccattcaagggacttttgctccctggactccagcctcttctgcccaaggcaagagagaaagaactggaaaaatacctttgctctgggctttgcatggcctggatcaggttcacagctaattagaagtaaatgtgaagcacaattatgtatgaaccttcggtggccaaattcatgaaaggaataacgggtatatgtttcctttctgtagaattttaacaaacaagtggcattgtcatccattatttatcttttttcaattgcagtgaattgttgcagtgacaaatatccaatttctgtatttacagaaaactcacacatgtgtagatcatggtacagtttcatatttactgtataaagtactgacttgtttttttaaatagagaaatttggtaattattgctctatttcttaagatgtgaaagatgatgcataataaattgataggccatttcttttgtgctcccgtaaaaaaaatagccagccagcttctccttggaaatcgtggctctttatatttggggaaacttaacctctagcaggatgagacacctggagagaacacactctaggcacacagcagatgagcaacaaatatatgtttataaaatttgttggttgacagagtcacggagaactggtattgtttttaaataccccaggcagggttgaagacacaccttgaaatatacactgcagtcttgggcccttagcattggatgaccacacagtcatcacttgttcacatcttcaacttggttacagttttgtgtaggattgtgagaaaaaggagcttgcaggactgaaggtaaaaacctgcacagcatcgtaagacaatcctccaagctgactgagcaaccatggctctcttacccaggcttcttggcctgggagaaatgaagtgtattagtccattctcacactgctaatacagacatacctgggactggttaatttataaaggaaagagatttaactgacacccagttccaaagggctggggaggcctcaggaaatttgcaatcatggcagaagtggaagcaaacacatccttcttcacatggtggcagcaaggagaagtgccgagcaaaaggtggaaaatccacttataaaaccatcagatcttgtgagaactcactaactatcaggagaacagaaagataggggtaaccacccccatgattcaattacttaccactgggtcccttgcacaatatatggggattatgggaactacaattcaagatgagatttgggtggggacacagccaaaccatatctgtacctccaatgtcgcttcattcattcatctgttctaatggaatctactacaaaagtcagacgtgttgattgctgaggaggcacagcattacacatggccttgttctccagagactcagggcttggagatcaaacatagccatggacggaagctaacagtggaacgtgttcaggatgatggcagagtctgaaccaattgtacgtagcaggtgagcaaaggaaggaggggccataaggaccttcaagctcttgcccatgagctggcctctcttcttctcttatgtgatgtgtactgactaagtgtggctcagtgtaagagaaacaagtagatgtcaaagtaacttgtgttaaaatgattccatctatttcaggagtccagttgtcatttctaagcccttgtttacagatgctttctcttgagtccagtaacatgtgaatactatattctgtgagttcttgcttttaaccccacttctcctgagttccctacatttgtaaaaaagaaaaaaaaaaagaaaaaaaaatcaaactaattagataactgaaccacatgtaccttccctaccctgaaaagaaaattgagccttctgaacttgtcatccctactacctcatcccatactctcattttcttctttacattctagcaacaaattttcatatacgtacacaaaaacaaaacaaaacacaataacaaacaaaaaataataataagagtaagagagagtgcttgaaggggcaccagctagaccaagtgtgtgggcctccaatttctcagagtctggcttgaactacttacagaacagaggtccttggggatcacacttgggtctgcctgtgactatagagctccccaggatatgagccccggaccaaaaacagccttttatatgaacccatgggctccaccatgaacctggtcctaaaaattagcctcttgattttttctttattattatcatttttttttttttttttactgagcagctgctatcaatgacttctcaagttttgctttctggtaactaccattccaaagcactctaaaaaccaattttacacttaataaattttaactattcaatatttttcattttaaaactaaataacagacatttaaaagagtatttcttttttaatgacactcatgccactattttagaaagtcaggtgacattcaccatgcattcctatctccttaactgccaaatactctattagtcaagtttgttcatatttacaagattttttttttggatgttttactgctatcagaagatctaacatctgtttctccagggattctccatgtgttctgtagtttacaacaattgaaaccactgttttcgaaatacatttggattaaactcaatgtactaagactcaatttcacagggagccccatgcacgcgtctggggttttctctcatgtaatttttccgaatggtgagacatttgctctggatttaggtgggtgagatagaataacagtggagttcaatggagtgcatgtgtaaaataacgctgttaaaggcccaagtgtggggagggtttctgggagtccctgtttctgcctggagcacaacagaagaaagaaagctcctttgactttgctcttttgggaaccacagtggcaggggcaagtccagcacatcgccttgtgtccttccctggccatcaacaacaccgtccatagacctttctgtggtgatgggaatgttctacatctacacttcccaatatagtgttgccactggtctctggcagcaatttagtgttgaaatatggccagtgagactgagcagctgagatttttattttatttaatattttaaatttaaatttgaattctaatatccatgcacgactagtggctatctgtattagttctttcttgtgctgctaataaagaaatacctgagcctgggtaatttataaaagaaagaagtttaactgacttacagttcagcatggctggggaagcctcaggaaacttacaatcctggtggaagaggaagcaaacacatccttttcacatggcggcagcaaggagaagaatgagtgcccagtaaaggggaaagccctttataaaaccattagatcttgtgagaactaactcactatcacgagaataggatgggagaaaccacccctatgatgcaattatctctacctggtccctcctatgacacttggggattatgagaactacaattcaagatgagatttgagtggggacacagccaaaccatattactatcatttcggacgatggaggtctacatgcctcagctactctgagatgtgtctccactgaaccctctcttatttctccagaccatcaatgtctctgatctacactccttcaatagaacaaattacaccactggtcccaaactgttgactactgtgcccagtgtcagtccatatgccattgttgtacagaccagaaaaggggctcttcctaaagctttcttctctcaagtattagaaagtgacataccgacatgcaaattcaccagggcacagatataacaggcaccccataagcatgggcaatgtgtgtggcctgcccaactccaactgcacgtacttgtcctgttctccatgtggtttccaatccttggatgtgtacacagcatacagactgctgacagcatgcagactgctggcaccatgagaacactcaccatcttcccccaacacctcacggtaacaagcagaggtccaaacaaaccacggagtcctgacaagaagctgactgctctgacaatcttcttcctgacacagaagtccatttcgtagtagtgtcatttctgtggggtcttcctgaagaatcatcatccatcatttcctgtaggatatccctgtgtgccttcagatatagggaatcagttacaaagccccacttcagcctctgctttgtggaacggagatcctggagtgctgtgaccagcttaggcattgtgttcatgatggaggcagaggtcaaagggtgcaagccaaagtacacaggactctgcaggtctaggcatggggtaactaacatgccaccacttctgctgtgggttttggccaaagcaagtcacatggggtgaagaagaacaccctaactttatgagaggaactccaaagtcacagagcagagtgcatggacacaggagatggaaaggagcgaagaactggaccatcgttgcaatccatggctcacaaattctaaagcaatgtatactgagaggtgaacactggatgtcttggcagcaagaacgtgaatatgggtgattgttattatctttgctttatctatattttatcatttcattttacagtgtcaaattatagaataggtataatttaatcttaataagggaaatagactcatgaaaacaatctggaaaatatagaaaagtagagggggaaacccacctaaactgtgtttttcaccaagatggttactagcattgtgagtgagacacttctttcttgctgaagactgtctcgtgcattgcaagatgtttaaaatctttggttcctggacatccaatgccagtaatggcttcttgtcatttttgcaaccaacttcaccaccaccgccacccacatttctaaatcacctccagaggcctccctcattgagaacacagaaaaccacatttatctttttgatgtggttactctttggcttttacgtgcatgacattcattcattcactcattttaaaaataatcgtatggttttacttatttattgttcattgttttccattgatatggtacaccacatggataatgttgaatatagatttttaaattcctatttaaattaataatgtacagatgattctgcatgtcacctaaatggccgaaagtcttctgatcttctcacgccatctggcctttaacaagaaaacatttttaaataggtacctaattggctgtaaaaagtccattgcattccccaagacttttcgtagctttctaaggtgagggaggggtgcctcccttcttgttgctatggctttagtcactcccttccatctctccccatcatcccagacacctctactatctgtttcctacagccctgccctctttccccaccacttttcgtggacacctctcttctcatttatttatccaggaatttcttactcaagtcattagtaggtaatagactgttactacacatttggtgataatggaagatcactgctgcatggagctggaaataaccccaaagtgtgtatcaggaatcacagctgctcaagttcaatggccactatgtgttttagggcacacttcaggtttgcagggagtacttactcgtaactttcttgcctgcaagttttgagtcaatttagacacgctccagtgagggaggaagatatcggctaaactgttggagaacatagcttgaatctgcagccaaagtcagcattctgatgcgttcccctcaagctgacaacctgcgagttcttacccagcctactgcatggaggattgtgacctatttttcaggagaggctggttatagagatcacataagggcagtttctttaacacattaatcccacctgatagaaaaatactgaccagcgagagtccaactcttcctattccctatcagatggatctctctcctttctgaaggagagaggaggacaaagatcccctgaatttctggtgagtccagcgctcttttttgtctccatcccaccgttaaactgccttctcctttattattttcatctcttctccaacatccagtgaacaatgcctccctcttcttcctctttctggccacagaaaaataaaaatatttattgctttgaaagtcacatccaatctgatcctgagttactgttataccttaaaggaatccttgtcaaagatgttgaggaaattcttccatatttcattagtaaaagaaatttataatttatacacacaaacacacacacacaaacacagacgtaatgttaaccaaaaaactctattgtgtttccttactcttgtacataaagacacctttttaaaaaaatgcattgaagatgaaaaacttataaaaatgactagtgaaaaataaacccaaagattcagggtatgagaaaggcccaagtgcactactgatactattcaataagtgagcctttgtataagagatgaattaaactaacagactaaggacaaaaaccactctgttccaacttcccaaaaataatagaaaaatattttaaaacaaaattaatagagaataggtacatatggacagtgcaaaacaagaaaatgtggatcagcagaccagaacatgtgaggaattcctagaagacagaaaccagatgggattagagtgacaagagtagatgaatctatagccaaaaatcataagcagcgtgcaggatgaatccccacatggccttggctcacccagctcttccccctttctcacttgtagttctcaaaaataactatagaaagtgctgggaatgtaacatcctgagataacgaggaactggctagaacagagcgcgggctgttcctgttcgtcctagaacacgatgtccttcagcgcgttagcccagaaactcaattgtgcctgggtataaaacccagggcagagtagccttttggggtccgtcagttccagggcaatgtaatgtgagacattgagataagactccatctgccccaggagcagatttcctgagccctaggggactggctcgccttgaattccagacacggattttcccttgctggctatctgtaggtaataaagttgctttaattaatttgctatgttagtcttctgtctccctagacttgtgcaagtgatagaataaccagtgactagtgaatctactagagaaactggggcttacacggtgaatcctgcttcacacaccccacagttactctgaagctaaaaacaaatgcaaagaaatcctaaagcccaggttagaagactgcaattagagcagcttccaggaaattctctcctgtcccctgtcccaccctctatgcaactcacaactgaacgtctatcagctcagtccatgaaatgccctccaaggaaagtaaaccttctggtcggggcttagtagaaggggatcaccagaagtagtagagggaggctgaggaaatgccaagtgtttataatattatacagttccacaattagtaatgtagttatcaatttttatatgtttgttgttcattgggatttctctataaagtttctgttcaaatacgttgttccttttttattaggttatctttttaaatttcatttttgtttttatattttttgagatggggtctcactacagtgccaggctggagtgcagtgatgagaatatggctcactgtagccatgacctcccaaaccaggcacctcagcctcctgagtagctgggactacaggcacacaccaccaagctcagctaattgttgtatttttagtggagatggggtttcaccatgttgcctaggctgaacttgaactcctggggagaagtgatccacctgcctcagccacccaaagtgctgggattacagatgtgagtgacaatgagtatgcctatgtgtcttttttctatatatatttgaaataattctgtgcatattctgggtaaagatcatttgctaatttgtgttgcaaatgtggcttctcatttcataatgtctcttctaagttctgtatggtatgtttaatttcctaattttaatgtggtaacatttaatcaatttctcttctttatcattagtatattttgtatctgtttaagaaatatttttctgcaccaaaaccttaacatatgctcctatgttattttttgaaagcttcgtagttttgcttttcatagttagctctataatccagatacagtttattttgtcagtggtgtgaggtagggattcaattttaattctgtttccatataaatatctttgaggtgggaggatcatttggggccaggagtttgattccagcctgggcaactttttgagaccctcatctctacaaaaaatttaaaaatgagctaggtttggtggcgcatgcctgtggtctcagccactcatgaggctgaggtgggagaatcacttgagcccaggaggttgaggctgcagtgagccatgatcatgctactcactccagcctgggacacagtgagatcctgtctcaaataaatcaataaataatatataagtttataaaaatatgaatatctttattgtctagggacatttatttaaaaatctactttatcccattgctcttcagtaatatgtttatttatgacttttccattctattgtgttgatcttcaagataccaaagacttattatagaactagtgtgatattggctacagatagataaataaataagtcctcttaccactttcttctccttcgagagtgtcttggggaaaaacacttggaaaatattgagtctttcccacccatatttttcaatctttattatttcgtttaaagtatgatttagcaaatagcaaacaggtggcctttttttttttttttttttttctttgagatggagtcttgctctgtcacccaggctggagtgcagtggcacgatctcagctcactgcaagctccgcctcctgggttcacgccattctcctgcctcagcctcctgagtagctgggactacaggcacccaccaccatgcccagctaattttttgtattcttagtagagacaggatttcactgtgttagccaggatggtcttgatctcctgaccttgtgatctgcctgcctcagtctccgaaagtgcttggattacaggcatgaaccaccgtgcctggccacagatggctattgttttttaaccctgagagttgctggccttcatttactccagcaattgctggaatattcatttagggcattagtccattttcatttagggcaggcactaatacacatgatttcagctcctccatctaactctgtgttaattgctgcttgcatgctgtggcatcccctttccttatgttgcttgtttgatcatgtttctgttcatttcacttttgcctttcctattaagaagttctacagtactttcttttacattcatagcgaatttccttcttgttcctttattcatacacatattacttaactattattttatagtaaattagcaatttttccccatcaagatgcacttccattacaatgtcttaatttcctcctacctcacaattccttaatgagagctgtagaacactttgatgtcccccaacccttcccatgctctatgccttcttattgcttcttacatgatctttgatattattttttccttccctcctctctacctattgctgtatggtagaatttattgaactagtttacctattaaaatttctgttaatttgtgtgcctttccctttgtgtatttctaaatataattaaacttccatatatgtgcatgtgtgtgttgaatattttatgtttcatatattagtcaggttcactgatcactactctttttattcatttttattttttatttttgagatggactcttgctcttctgcactcggctggagtacaattacatgatcatggctcactgcagcctctacctcccaggctaaagtaatccttccatctcagcctccgagtagctaggactactggcatgtgccaccacacacatataatttttttttgtatttttgtagaaacaggatcttgccatgatgcccatgctggccttgaattcctgggctatccactactctttcttctttctttcatcttgtccatcttaattttttcattaaactcttttttataggtattctcctcagatgagatacttaggtgatgtactttctaaattcttgagtacatttctttcacacaattatatttatgatctattcagtgggcatagaagtttcagtttgtagatcttttctcttacatatctgtagacacagttccactgtcttctagcatccagtattgcagatgaaaagtctaatgtctctaatttgtgctttctacttcaaagcatgaatacatatttatttttctgtaaaatccaagaatcttatcacataagtctagatatatgtttgtgggtatatgtgttttctcatcaatttagtccaatctgtttaagtactttaaatgtgcagatatttctcagttcagggaatttacatattcattctattttgtgtttaatgaatgcctcttgtatatctgctttttcttttcccataacttatttcattcatgttagacctcctagatttatccactaaccttatttttttccaccgagtttataatctctttttacttttttctctgttctttcaaatacctcttgatcttgatctgtgttactattaattcaatcttaatagtaacaaattgcttatttaatttatttactattttttagttcaaaactcatgtttaaagccctgaaagtattttatactgaaaattaatttgcttaaattccacatttaaaaaaaaatcaagatattcatcaatctcacccagcagtctcttttactgggtttgcatattaattattctgctcaatcttcttcattaaggtttctgggcatttttaaatgggacattattattatttatgagtttatagagttgacttagcttgggctgttgcaggaatcctgtggatgataaaagacatggtgaatgctggccctgaaagcctggggagtccaggcagctgtcacctgccattaaggcacctagagagatcgctagctctctgatgtccttaaacatatccagccgtaagttcagggaggtcacagttcaccagcagcttactctttgtcctttaagaatgtccataggcaagccctcccaggacattcctgtcctcctccggagctctgttgctactgtttggttgcttgtctagcatctatgcttcctgccaggtctatgatattccaaatactcacaccaccaagctgaatcctatagaacccagcagccctgtgctttaggagaggccagcagcttggattaggaagtgggggagggaaaagagcactggattcactgtgtctacagattcgccttgacatcatttgccagggtgttccaaatcatccttcactgcaggtacgaattcagtgggacaatgtccagggattttgcacaaaaagaatttcgaatccagacatttatatccaaccaagcaattattccattgaaagggaatagtaaagatgttctgatttgatcttttttatctgaaaaattgttcagacaatgtaggagaaagttttcatgactttgggttaggcaacaagttcttagatatggaatcttaactatactccataaaaaaaccagaaaaattggacatgatcaaaattaaaacttttactccaagaaagacactactgagagagtgaaaatataagctacaaaatggaagaaaatatttaaaatcacatatcccataaataacttgtatatagaatatataaataactcttaaaatttgacagtaagataagtactcaatctttcaagtgaacaaaaatcttaaaaaggcacttcactgaagagaatatatggataacaaataagcacataaatagatgtttgacatcatcattcatgaggaaaatggccacagccatacaatacttcatatttatttgaacagctaatatatataatatatacaacttatatatgatgtctacacaatatgtattatatattcaatatatacaatgtgttcaatatatacattatatcatataatgtgtatataatatataatatatcatataatgtacatataatatatacaatataatattgtatatatacagcaatctatattgtatgtctattatatatacattgaattatatacattgtattatacaaaatattatatataatacaatataaagtattgtatatattatatattgtatatataatatataacatgttatatattatatacattttgtactatacattataatgtataatacatattatatatgttataacatgtaatataacatatattatgtaatatattatataaattatgtatcagacaatatcagagaaagttcaccagttacactagaatgtttgtacattgctattgagtatccaaaatgatacagccactctggagatacatgacccaccaatttaacatctcaacatttactgtagagaaatcaaacttacatttatgtaaaaacttgtaagcaagtttatagcaactgtattcacaatcaccaaaaactggaagcaaatcaaatgttattcaatttgtaaatgaaaacacaaaccatgatacagccacacagtggaatactattcagcaatataaaggaatcaatgtaaaaagattaatggctttcaaaggcattatgctgagtgaaagaagccagtttcaaaaggctgcgtactatacaattttatttatacgacagtcacaaaaattcaaaactacagtgatagagttcagtggttcccaggaatgaggactgagagactgatgtgactagaaagaaaagcaacaagggagattgttttgtgtgtgatactgttctgtacatgtatggtagtgatagttacagaaatatatatatgtgttaattttttaagaaatgagcacacacacacaaaaagtcaattttactaaaaatttgtggtggctacatgaatctatatctatatatatatatgttaactttcttagaagtgtgcacacacaaaaaagtcaattttgctaaaactgatgatggctacatgaatctatatatgtgtcattaataatgctttttataaatgtccacacaaaaaagtcgagtttactcaaaactcatttcaaaaagaaaaaagtaaaataaaggcatggtggatcaaacctaaagctatgccttctgactacttctagaaatggggaattgataacacagaaggaatacaattaaaaatataatatgttttccagagctgagtttttaaagtactttgtacaataaataaaaatatatctacatttagacataccatatcagtatacttaggataataaaatgtcaaaacattcagaaagtgaaataaaacgtcctttacaaaggagcaagcattagcctggcatcatgtatctaatactttatactgggtgcaaacaaaaacaaaaacagggcaagacttttaaagttctgggagtgtggttagggaatctgagccaagtgagagagaataataaagatattttcaggctgcatggactccagaaacacctcaaagacacttttactttggaagtcatttgatgactgtagcaacgtggagtaaaccaagaaagaaagagatgtggactccagataacagtggatccaaactaagaaatggtggatgttctatttcaggatcactgcaactcccaagcccagagagcacccggttcagacgcagatggaaagatggtggctgcagaggaaacgaaaattggagggttatgtggaatgactgagacactggaaaaactggggaatatgctcaagacgactagtgaagctggttgccagggtttgttttgttttgcttttcagaattaattgaaacttgactgtgggtacattcttccctgtgtgagtggcttaggggtcatgatgttggactcctggtgaaagaattgcatcttaatattctactttgttctgctgtcagcaacttttatataatcataataatggaaagacattgatcagcctttgacttgtaaaatcaccccatagacaaatcacggaacgtataacttattacagtgcaaaatgtaaatgtgatgaatcttgacaaaataaaagaggtacatttgaaagaggttgggaggtgaaaattgaagaggttcagagtactaataccttcattttacaaagttggaattaagaatctacagttgagctaataagaaatgatgtagcatctaagagagggattctgaaaccagactgcctgggtttgaatgtcagctctgccatttattagccatgtgaccttgggcacattacgtaatctttctatgctcccatttcccaatctgtaaaatggggatattagcagtatcttcttcaagttgcttaatatatgtaaagcacttagaatagtgcttaatatatgtaaagcacttagaatagtactgtatatgtgtttgctatgagctcagagatgaacaatagaaaaactggtaagatgagtgacaaaagtaaacgggaggaaggatatagaaacataatatattgcaattgagcaaaaaatccaatccaacaaagaagttagtagacaatgtctacatccaagaattcgaaaatggtaatttacaggtatcacaatagtgatcagatttataaaatggtttatttctggtaaattaggctgtgatttggtgataagagtgaagtcttctgaactgttcagttattcagccatggagatgtagtcttttgattttttgttaaaagtatgtggctggattaataatataaataagtcatctcactccagttagaatggcaatcattaaaaagtcagaaacaacaggtgctggagaggatgtggagaaataggaacacttttacactgttggtgggactgtaaattagttcaaccactgtggaagacagtgtggcgattcctcaaggatctagaactagaaataccatttgacccagcgatcccattactgggtatatatccaaagtattataaatcatgctactataaagacacatgcacacgtatgtttattgcagcactattcacaattgtaaagacttggaaccaacccaaatgtccatcaattatagactggattaagaaaacgtggcacatatacaccatggaatactatgcagccataaaaaaggatgagttcatgtcctttgcagggacatggatgaagctggaaaccatcattctcagcaaactatcacaaggacagaaagccaaacaccgcatgttcttactcataggtgggaattgaacaatgagaatacttggacacagggcagggaacatcacacactggggcctgttatggggtgggggtctgggggaagaatagcattaggagaaatacctaatgtaagtgacgcattgatgggtgcagcaaaccaacatggcacatgtatacctatgtaacaaacctgcatgttctgcacatgtaccctagaacctaaagtataataaaaaaaataagttgtctaactgctaaatcacttttgtgatgaaattgaacaaggaaaacttaacccaataaaatgaaaggaagcaatacaaacaaacaaaaaatcatagtaaacggaaaagattaaataaggaggcgagaaataatcggatatttaaatatttgtgatcactgaatggactaagtggtcctatgtgtcagccatgaaaactcgctgcatgggagcacagtgggtgacagcatcaccagtggcctctctgggtcccccactgcgttccctccaaggccacctgagcctcaggcagctctcagggatacacatgcagtcccgtttttacaggacatgaggtttctctaacaggaaatttggctccaagtctcaccttgaccaggctggaactttcttggatctgaactgcagtcagagactcttcctctccagtcattccttccccttctgcttccctagtggtcagacctattcactttcaaaaggccctccctgacttctgctttcgactttattctttacttgcactcttcgaataaacaacatgcatgtcttattccttctttgtgttaactttttgaaggatccaaattgacatatcctaccagaagatatggttctctgatttactgattaaacaagatccagcatgtagctgtcctcagggatgcaactgaacaaaactgcacagaaaggctgaaaataaagggatggaaagaaaatgcacaagatagaggcttacacaactaaaaaggaaaatgcagacaagtggagctaataaaaaaaaaaagaaaaaaaagaaaaaatgcagcaatattgatatttaaacacagaaactgaaaaattcatgatcatagaagatgactttaacgcaactatttgagaaaatacagatcaaatcaacagaaatctgcaagaatatggagagtgtgagcaaaacaaataaataagcctcagtgatatacacacaaacacactctttcataaccctaaactttttaacactcacagaacatttacaaaattgtattatgtattaaacccaaaaattaagataaattacaaacaagcagaaatcattcaaaccattgttctctgaccataataaaactgaataagaaattaatattaaaagaaagcaagagtgtgggctgtggggtggggaaaagcaacaatccacttggaaaaattatttaagtaactcttgatttaaagaaaaaaactcaagtcattaaaaagtcataaaaagcaataaatgctataaatgtcaaaacatgtgggatataaccaaaatcggactcagaaaaatatatagctataactgcattttttagaacctgaaacaaaacaagttaaacaaaagctaggtataaacaaagaagtattaaaaaaaaaaaacagtaaactctaagaaagtaatttaaaaaaaagaaacacagaggaaagtaattaaacagaacagcaatatgaaaagcacaacttaccagtgaatccaaaagccaaatctttctatgtcaacactgaggacaacagtaagaaagtggacggggccaggactgttccaccaaatgcccctagagtgatttccttgatgtaactcatgtcaccattttcactatgaatgtgggtgcctcataacgtgtgccatttatgcaagactaattctgtgttcctatagtgttgctttcctccattgcattaccttagcacctttgccaaaaaagtcgatttaacatatatatatacgtgtggctgtattttttggctctcattccctgttttgaaactttgctttcaaatgcatacacatttagaattatttcctcttggtgaattcactcctttattattttatagtgtctttcttttgtcattgatagtactctttgttttaaagtctactatgtctgatattaatgtactcactccagttttcttaagatgaatgtgggcatggaaaatccttttcccattcttttatttttaatcatctatgcctttctatttgaagtagttcttttgtagacagcctatatttgtttttagtagtagtgctctttatataatctgacaatttcttctgacttttaattggggtatttaagtcaattatacttattgcaattatagataaatttaatagtaccgttttgttagttctttttgtttcatctgtttttttcctctttatgcctacttttgaattcagtaattttatgatttcattttatcttcactatttgcgtattagttacgcatttttaaaaaatttttagtggttactctatggtttcaatatacatctttaatttctcaccttcaaataattttatactgcttcaggtataatgtaagacacataatattttcataattgcttcctcctttctttgtgctattattgctgtgtattttcctttttaaataaatttcataatacattgttactattttcacgttagatagataattatattttagagtggtgaaaataagaaaaaaattccatttttatatttacttcatggttgctgtttctagagatcttcatttctatatgtagatccaagtttctatctgatattacatttcttttgcctgaagaacattaatatattttgtactggctcctattggttaactgtgaattctctcaggtttgtctttttcttcctatctggaaagtgtttatctcacatttatttttgaaaggtattttagctggatatagaatttggagttaatagcattgtttccaatactttaaaaatgcctttcgattgttttctagcttccttagttactgaaaagaatgctgctgtagtttccttctttttgaaaagcgtcttttcttttcttgctgccttcaagactttttctcttttttcatttttttttttttttttggcagtttcacagtgatatatctaggaggggatttttgtccttatcttttagaattttttctgattttttgaaattcttggggctttgatttggtgttcattgctaataaaaaaaaaaaacttgaccattatctcaataaatacgttttttacctcaccttttgtcttctatggcattccatttgtatgcttatttaacagtttgatattatcccgcaccttttaaatgctttgttctgatttatttttcactcttttctcttccttttgtgtttcaatttgcataattttattaaattgtcttcaaattcactgattcttctttcagttgtgttgagtgtactgatgagctcattaaaggaattcacttctggtatgtattttaaaaaatatctagtatatccgtttgacttttttcttatggtttccctctgacggcagaaattcccccatctaattacagatatgttcatttttttcccactggatcttttatacattaatcactgttattgttaaattgttatctgatggtttctacatctggttatttacgagtctgaccatgagttgcgttttgttttctgctgtgtttttgttgagactgtgtgtgtatgtgtgtatgtgtgtgtgtgtctgtgtgtgtggtgtgtgtatgtgtatgtgtgtgttgatcttttatatatcttgtaatttttgcctgaatgttggcatcgtgtgtagaccagagatactgagataaatagcatttattcctcaatatttgcatttttcttgttttgtttggctgctagtacggtttgagtcaatctagtcagaaattggttttattgttgccatggttaccctccatgcacaatctttaacttccattagtaatgggttgttttcattttgtgcttgagtgcaggctgatgagcctaaatacgtttctcagaattactgctacagcctcagattttaaacaatctttgctcacctgcaccacaggaggggtctctcaccattcttttgcctcttctacagtggtagagtgctgttgcttcttttggtgcttgtcagataagtagtaattgtcaacgaggcttctctcttgtccttttccagccttaatcttataaaagtcttctgtgccgtggcacaaaatggcaaataaagacataaaactacacccaactttattagtcattagagaagtgcaatttaaaaccataatgagataccactacatccagaactaaaattaaaaagcctgagaataccaaaagttgaccagtatgtggagttactggaaccttcatacactgctgttgacaatacaaagaggtacattcacttggagaaaacagtttgggactttcttataaagctaaacacatactgaccatataatggaaaaatcccttttaggtattttcctaagagaaatgaaaatatactttcacacaaagacttgtttcatatatgttcatagtagctttattcctaatagccccgaacgggaaacaactcaaatgtctatccactggtgaatgggtaaacaaattgtagtatagtcatacaagagaatattactcatcaataaaaaagaaattactactccccataatatagaagaatctcaaaagtattatgcggaatgaaataagccagacatataaaacttctttatattatataattctgttgatataaaattcccaaatacataaaaactaatgaaagcagttgtttttgtcatcatggtagagaccacaaaaacaacagctttcatggtagagagagaatttactgtaaaggagcctgaagaaactttctggagtcatggaaatattctacatcttgatgttggtggtagttacaaaccatgtgcatttgtcaaaatttatcaaactgtatacttggaactggtgaattgtgttgtatataaattatacccagtgattaaaagtaaaaggtgaataattattccagttgaataaggggagcaggcataggctgggggaagatctatgctcttgaacccttctttagctgaagcacttcttaggaaccactaaacttccatacatctcagtctgaaaatcagtggcttagttttccccacttgcacgcacttgaaaatgagagccagaggggatgtgaatttcccaggtcgtatagtttaataatcagctctaggattttaaccagaattacataaggaaccaacagaattttaaggagagaatcaattgtcttttattcattgctttcatcttctaagtaatttatgattaccaactatatatatgacataaagctgctattggagtgatatacaaagaaaattcacatatttggcactctgcataccttcttttgagaattgaatttcacatgggatttatttctctttctcaggagtgattcagactgactgcaaaagtatgtcttttacagcaacaacaacaaaaacacatagagattcagttatgaatttgaccatctgcccctggtcaaatctccactgcgcacaacacactcagattatcagtgacaaaactctctggatgagtgtgctttccttggagctgctatgaaaacaaagggtccagggagatgttgggatgcagccaatccttgggggctggtaggtggacaagtgcaatggaatttgagattagggaatcccactcaccgcttcttgcaggagggaccatctcttttctggagcttcaagtttacccaggaagattatcacaggttcagaaaactgttttattttttaaaaaatgaccattttgggattcgcttgccttttcctctttccaaagaggaatcattcttggaggctctgacatcagcacccctcctactgctccagcacagccattaatcacccatcaaattcctgccttatttccttttggccttggaaattgtatgtcttttcttttggccttggagattatatgtctcaagctttcttggttgcttcttttttttcccctttctttttttttggctttttttttcttttatgcttttattttttctttctgagagatgaggactagggaggagaaagccattgtcaattaatagagagacattttcaccaggtgtttctcaattatcacattggcagccagccccttctgtgtaaattgtactgaggaaaaaaaaagaaagaaagaaagaaaaacacctctcagtacagacattcccctgggattgtaaccagctctgtgtcttctttcctcggaaggacagtcatcctctgggaacagccctgcttagaactataagcaaagccaaggctgtctcctgcaacatcatgatttgaatgtgttaaagtgtgtgattattattaggtcttaaacattctagatttgctccctcattccacacaagtttcagaaataaacccgcaactagtctctaggagagactgatgcttattctgtgtcagaggcctggtccccagacgtccccataaatttgtctgctggaagaccataaacataattctgagcatggaagttatttagatttgaattaattgccttttcagttgttttcaaatatgcaaattgaaatagccaaaaaaaaatgtacattaaaaaaaaaaaaagcagtccattctcctggagagattctagaatgtcctttgccaaggtgatctgctttttgtcaaagcagactaaaaggcaaaggtgcattttttgaaaatggcccgtgtatgtgtgggtatttcctcctgctctgacattttcttagtggggtgatcaagtattttgtgttggtcagagcctctttgacttcaacaagccaccacaaaatgaagtaagattattaaatcaactgtggatagtaaaagtgccttgatcagctcttggaggctgtaggaaaatgattttgtaaagaacgctgaaggagaatgcaggaaaagacacactcatcatcactaaaagtcacctaatgacacaagctaggcaatcggcgttcttctcatcagtaaggtcagaaacgtctctgcttacagctgttatgacccagcaccctggcttcgatggagacctcgagagacctcttggggggaacatggtggtttatctggggacacaacttgtaaacatccctcatctaggaatttccatgaaacctcctgagcttggagagatgcccagcttgtgccaactcctgtataacaagctccagatgctttctctactccatgccaggtgggattccctgaggtttgcccttaacccatctcctcaaagcccaaagtcagggatggggcagttctggggttagacacttgcacggggctgcattgcatttaccccatgccctgctccaataagtgttcagcttctggttgtgtccattcatagtctgcccagacagggtcaagtttagcgaggagaagggacttcccctctctctatgacgtcactaatcagtaatcacaggtcagctggtcacatgaagattcagtttttgagcagatgtgagtgcaagtcctgagctaggaaatacagaagtcggagaaaaatgtaatcttaagctcatctctttgccttaggccagttccccagaagcacagcctgagatggaattctggggctaatgacttattggggaagtgctctcaggagaagccagtgagaggtatagtttggggcaagggaagaatcaggccaaggtctggttgtagctgaatcctggcctcaacttgagtgcactggaagttccgggagggtgcacagtcccaggttagtctgggttgtgggaagagggtgagcctctacacatttatatctgtctgtcatgggctatggatggcctgcaggaaggagatcacaatctcccagtgtctctaggcaaggcagctcctgagggcaggtctcctgggggtggagtgcatctgggagcacccatgcttttagcagtggactgtgggtgctcaggctcattaataggcatctgggcaaagcaataggacagtgaagatgcagctgtagtggaaaacaagatggatgcatggtcataatggacttcctaatacactcccagatgtcagccttcagctgtgcagggaggggagaggtggtgcccatagagcagatgcttccccagccaggggacacaaggccagggctaaggccaggctcaccccagtgacaaggatgtctgccctgcatctctgccacatgaagcagtgaaatagcagctcttttggcacacaggggaaaagccaggatcaaggtccggcctttcagcagcacttacctgctggagtctttgtgtatcatgccaagccctccctgggagctggagcatcctgaagtcctcagggactcttctggagcagaggttgcaaactgcatgcccaagagatgcctcctcctgtgaaaatcgtgtgtgtatgtgggcatttaaaaaaaaagagcatgagacaaaatttaaaaatctggagatttctcgtaacacctgggcttttaggttttgctgttgctgttttatgaatctgatgtcctcaccataaggcctgaccttcctacctggacgcaggtgtgtggtggctgtgcctttcatgtagggtgtttactctccaggttgtcagctttctggcccctgaaagtgtctacaagtgtgacttcagaatatatgcatgaagactcaagattgacagaggggccaggcatggtggctcaggcctgtaatcccagcactttgggaggcccaagcgggtgtattacttgaggtcaggcatttgagaccagcctggtcaacttggtgaaatgcacgttgctcacctgtaatcccagctaattgggaggctgaggcaggagaatcacttgaactcaggaagcagaggctgcagtaagccaagatcgcatcattgcactccagcctgggtgacagagcaagactctgtcaaaaaaaaaaaaaatcaaagattaaaagagggacacacactgacctttgcaagcacagattgtcacagaaatgaagagaagccccaggcatcagggccttagggtcacaggcagagcgaggcctccccaagaggagaaagaagccaacatggccaagaggtaagacttggtcccagaatgcatgatcaaaacccagaacacaggcccatgtcttcctgtcgtcctcattgctctggcacttgacacgttgttcttgtgctgggccagggtcagtgggtttggcctccacagggtcactcactgtatgacctcatgtccctgcccattgcttctcttcatccagacctcaggttctcttacctgaaccaacactattgtcccatctcccctcagccgcccccttcttctcacctccaacctctacccctgttctatcccagcctccacagtaatctgctttcagctcagcccagatcatattccttccttacacatttttcaggtgcccccaaagcctggggtgggtcactggacatcaccagaggaatctgacccatgggtcatccatgtgaaaggacagtcctgatgtatcaggaggctgcttcttgggaaacttcgggttctgagttaacacagtaaagtaaaaactctcagtccagccaatattctgctcaggatgtgtctatggacaccacaggctctggaaggaataagtctcgggggcccctagtggaggatgtgcatccttggcccacgtcctctgcaccagagctgttaagtggggaaggcaagcagctggagaagctggggaggatgctggagacccatcctggaaaggccctccatccctccacccaaactgcatgcactagaattgacttgtgctctactgggacacccaagcccagcctgcacctgcacatactcagaaacagtgaagcaagaggaacacatgtttgagttctgaaacacacctgagaagatgcttcctccaagcacatatccattatggtgagtgcaatagtgatatcatccaaagaatagaatactgaaaggcacattatgcaaatgtgcattcccaattatggattcatctggaagcttccaaaacttctaagacctcattccaggcttagccaacaaccagtgctacctcagtgattgcgcgaacattacttctaggataaatttctctctcatcaaatgagggaccttaaggtccatgccttgcccaaggtcatgttgccagtggggctgaagggcagagagaacctctctgtgaggtgtggtttcttcctggcagctctctggggaggcctgaaactctcgtggcccagggacaatgctgttggatgtggggtactggcaagtactggcattggtgattaatagataatgaagctcaagatcaggggatttcagaaatcttcccaatttcgggcaactaaacttcaatgtataaattcaatctaatccaagaattttttttggaaaatgatcattataaagtccatttgcaagaataaacatcagaaactgtaatgacaattacaaaattaaccaaacctacagtaataatagaacaaacaaaaaagaaaagaacggcaagcttgctgtttcagctagtaaattgcaaaataaagcttcagtaattagggtgaaatgcaggtcacaggttaacatagtgcttttgattgtatttggagtcaccccagagtttaagaaaaatacggatgcatgggtctctctctcaagatgctgatttcattggtctagattaagtgagacctgggcttcacagtttgtaagtgctctttagattattgtaatcagcagccaacggttaagaacaactggattaacagaagggaatcaactggagagactgtcaaaaatgcgtgttcctgtatctgggtccactgtttcaggctctgagaagggatctatgaaaaataaggcatgcaacacatatcaaagttttggaagcactggaaagtccttatacaaaagagagtccttatacagttctgcatacatgtaggcattcagtagattctaaagttgacagctcaaaacaccgaaggagagatatagcaagggtgttagggtaatccactagccatttggagatcaagttggatctccagttcacttcttccaactaaaaccataagtaaataggtttaactaacttataatattgtgctggagaaaggcgttctaggctttctaaggaagatggaaactttatataaagaagaaatgtaataaatttaactacctaaatatgaaactaagtcatgacctacaaaaatatgtaaactagaagtagcaaagtgcaaaaaagaaagttgtcacacatattacagataaaacgttagtaatcttaatttgcaaataaagaaaatttaaaatgaacataagccaaaaggaaaacaacaaatgttcagtaaaaaattaagcagtaaacacagagaggtaaattacaaaataaaatgtacagtcaatacattctaaaaaagatgttctacctcataagtaatcaaaagtgctaaataaaaatcaaaatgagtcatctttttcacccatcatattggaaaggattaaaagtttgacaaaacttaaaaatagcagggatgtgggaaaattgacattctcttgcactgttgttagaaatgtaaattggtattcctttctggaaggcagtttgtcaactgaaattaacttttttaaaaaataagaagcatgccttagcctagtaatcatatgcttgggaatttattctaaggagataattgctaagtggtgcaaagatatagatacaatagcattcattaatgcttttaatagtgaaattttagtagcaacataaatatctataaataaatgattggttaaataacctataatatatgtatactaaaaaagcccccacatttgaaatagtgtatttctatagatttctatttactgaaatgatggttctcttttactcctcctccttttgtacacattatttcttctccttgggcggcccattctcccacactttcatatttggttcactcctgggagtgcccaaccaactgaaattgccccttcttctgtgaagtcgtcccttcccttctgagccacataagtagtcaccactcttcatacccaagacatccctttaccattcccattgcagcacttgttcactcatttattcaatatatgtatcaggctctctacagggctcttaccaccctctaaagtagtttactctgccatggccatctttcccactggattgcaaacctttgcagagcaagaaagcgcatgattcattctgttaccccagattttagcttgggacttgatatatgcccagtacaagcttaatgaatgaatataaggaagaatgaatgaaagaaagggtgaatggataggtggatgaattggaggaaggatggatagatgaataaataagtgggtggattaatgaatagaaaaaaggatggatgaatgaatgggtggggggtagatagatgagtgaatagaagaacatggatggatggatggatggatggatggatggatggatggatggatgaaggaatagaaggaaggatggatatattaacagatgtgtgggtgaaaggatggatgaatgaaacaataaaataaaggacagatagatgaatggatggctgaatggatggatgaaggaatgggtacgtgggtgggtagatagatggataaaataatggaagaaaggatggatggataaatggatgcaggtggatgggtagatggatgaatgaatagaaggaaggatggttagatgaacagataagtggatagatgtatgaatagaaggaagaatgggtgaattgatgggtgggtgtgggaatgaatagagggaaaaatgaatgaaaatggatgggtgggtgaaaggaagaatggatggatggatcaatagaataaagaatggatgggccgggcgtggtggctcacacctgtaaccccaacactttgggaggccgaggtgggtggatcacttgaggtcaggagtttgagaccagcctggccaacatggagaaaccctgtctctactaaaaatacaaaaattagctgggcatggtggtgcattcctgtaatcccagctactcaggaggctgaggtgggagaatcacttgaacctgggaggcagaggttgtggtgagccgagatcgcaccattgcactccagcctgggcaacaagagtgaaactctggctcagaaaaaaagaaaagaatggatggatgaattgattggtggatggatggatggatggatgagtgaatacaaggaaggatggatcggtgaatagatgggtgagtaaatgaatggatgggtaaatagatgggtgggtgaatggatgtatggatgaatgaatagaaggaaagatggatatatgaattgatgggtaggtagatggatgagtgaatggatggatggatagatggagactgggtagattaacggatggaataagtgagtgagtgattgagtggtagggaagacagatgatagatgaaagtaaaaggattgggttgttgaggagatggaatagatgcataggttagtagatggattatcagatgagtaggtgagcaaatggaaaggatgccatgttcctcagtccatcttcttgccattctgcctcaggaaggacattcagataactcttatcattaaacacgctttccacagctatgtattgggtctacaaaatgttaaaagttatcaaagctatgtaactgtttgaaataattggttttaccataacaaaaaggaacagaataaaaacccctctaaaacaaaaagcaacaaatttgtttcatggaccttgaacatgttcagaagccaacaggggagaaagaagcagctcagagattatcgacagtaagaacccacttccatgcccaggcctgagtgagaaaggaagagctcagttaccagatccaggagcagcccacagggtggcatctggggccatcctgggctacaccagtgggaggcagttgcagagaaagtacaatcagtacccaagtgagaggacaacacccttgcttcacttttcctcctcccctaactcacccacctgtgcctctcactggccaaacccaatagggaatcatctgacaggggaacctggaaacatgggctccaggtatcagcagagcagggaggagtgatgaatgcatttgaggacaaacaggccaacaactgcacacccgacaaaattgaaatcaataaatatttaaatgtgtccacaatgtcacattatttgtcagccaaacaactgcaaatgaactcttacatatgttatgaataaattatgttgggtgtgtgtacattttaatacagctgatgtggtagaggggaggagcgcctggggacaatgaggccttcaagtgaccctcccaactctcttcttgtgcaagtctcaagattcagcttcctgttctctaatagaataactatgggcaaatcactcagtttccccctctttaaaatccatgtcaattttccaggatcccagtgaaatgaaagtgaaataatgtttgtagaagtacccaggaccccatctgacctgatggaagccatcgttttaattgcttctaaggggcactcagccagccaaaggaggcaggcacaggtgcccttcatcagaccactttgtcatgacataacaaaaacctgaagaagtacatctttctgaaactaaaaatcccacatccatcaactcatggcgaggacatcatggtggacatgggcaatgatttaatgacaaggacactcaccccagcatatttatattagtgcacatattatattcctaattattgagcaggaacgggtaaattaaatgagggggtatcaacacaatggaacatggagcacatatgtgtttttgtatggaaatgtctacaaatttgttttcagctgtaatctctgaaatgaaattatgggtattgttttctttgctttctttgctttaaaaaaattatcagtgatagctgtgccagttcagctgtgccactgacccagcgccacagttcagaaaagagcaatattgacagagcagcaactaaggacaaattacctgactgaggtccttctcagtgatgtcactctgcttgctgatgaactggacgctcgtggtggcccccgggcaactggcactcacaggctggaagagtgggtcttctaatgaatgcctcgagggtcctctgtgcgctgccacctgcatggccaccatctacagtcaacaggtacaaatcacaaaaataacctcccctcctggtctacaaggacattaagaccctggcttcaagaccattcacagggagttatatgcagccatagctaacacacatgtttgtaaaacctttgtattttctatttgcctttagttttttcccccaaaatttgagatagcttcagtgcattcctgaggatcagtacctgctaaaaagactctgaagcagaagttggcggtgaaacccagggagcctcaatcaagtggctttccgcaggcaccatgtgtggctttggtgtagccccgggagcctctttacctctctgggtctcagcaccttctatctgaaaggtaggatggccatgatgaccctggaaaccctgccatggctctaaggtaagataactcctctgattcagtttttagttttagtctgacatagtgaagcaatgatttaaagctctaaagccagcatgagcaaatttttttctgataagggtcagactgcaaatctcttaggctccatggccccgatgatctgtcttgcaactgctcagctttgctattgagcacaaagcccagccatggacaataagtacacaaatgagagtagtcatgttctgagaaaatgatgttgacgagaccacctggtaggttggattttgcttgtaggtcctagtgtgcagacccttgctctaaagtaaactgtttccaaagacttaactagtgactgatggagataattaaaaatgtagacgacggtaatgatgatgaagataaaaataatacaagcctctttacttccttttatgcaaagtgcatgtgtgtgtactaaaaattaaaatagcaccagtggcgatcagcaaaaaaatgtctcctccacccctaaagatgttcattgcttatccccagaacctacctcaccttacacggcaaaagaaattttgaaattgtgattaaggtcatgaacattatcacagagagatgatgttcctgatgatcttggtggacccagtgaaatcacaggagtccttaaaagcagagaacctttctggctgggtcagagagagatctgagcatggacaaaggttcaaaaagaactcactcctctgtggctggctttggacattgagaaaggatacgaagagagcaaaggaattcgggcagccataaggagcaagaaaaggcaaggaaacagattctcccctagagcctccagagaggaatgcagccctgctaagacttcatgctcagccccaggagatggagagaagtgtaagataataaatatgcatcacttaaaccatcaaatttgtgataatttttatagcatcggtagaaaactaatactctaactccctgagaaaaatttggatattacaaagtctaatctcacccataatgtcactacccagagatacccactattaacatacattagaaatattattttagattcctctgcatatatgtgtatgtatgtgtaaacagagaatatatacacattatatataatatatattatgtactactatatcatatatactacatatacacatattacatataatacataatgtttgtatatactacacatgtatttatatactatgtaatataaaattgtcatatatattgcatataatgtgtatatatataatatacattcatgtatatctttatagggagagagatataaatataaaccattacactagtttacattggctgtaattcagattctttttatttaattaaacatttttaaataatttccttgtgccaataagttttcttcaaaaacatgctatagatgagttataattccttcacttctccccttttaattgtttctgattttttcactagtataaaaatgcccaaggagaaaattcatgcacatattaaactgttagggtgctataaggttactattctcttattgccataaaagtatttttccctgttttgtttgcctttaatttattcggggttccttttgaggtatggaaattttgcattttgttttattccaagagatgaatgcttctccattactttttttcttccatggctggaaaggtgattctcagtcttagatttgtgtcttcttctagtgctcataagggttcttgttttcagttctgtctttgggctaggtggtagttattcagtttcccaagttgctaagctgtgtttccgtcctcatttattgaatgatccttcatctttgaccacaactatttgatgccactaccatactccacagcttctagaatgaaatttttttccatgttagtatctcttagatctgggtcacctttcagactccagcacctaaaggtcttcattggcttggcgtggaggccacttcttcctggaaactttgggatttgcttatgctatcatctggggacactatggacctgagaccacttcaggtttccagtctgaagttcctttggacttcacactgcaacactgtaggcattggctctgattccagttctcagggggagacgtattttcttccctccacccagtgcaaaggttaagatgcaagcgcatttccttgtgatctctttctgcgcggtgcttgtctttcttaaggacacttagaccaagaatatagcccttgtcatagtagttctattaaattccaccttgggggtttttcctctgttattggtacataggataatactgggtcataccatcaataatgtaacttatattcaacaaaatataatatattacatataaaataaagtatatcctaagttcagtttctggatcatctagtatatttgtttttcctatttcttgttaattcactagtatgacagtgttttgagatttttaactttaatgtttcttttaatatctggtaggacaatttcttcctaattactgattctttctaaaatgttccaggctatttctttcatttgagattaatattagaattaatgtttcaagttctcacacatcactcacatcagtaaatgaataatttttttaaaactctgctgaaatttttataggatcttcattaaacctacaaataagtatgggactaattgataagtttacaatattaaaagtcaatatattttctaatcaaaactatttgatcatcttaaagaccttttatatcttttctatcattaaaattttataattctaattttttaatatttctggttaatgacattctttcccagttattatatattctaatgttactgagaatggaattctgtttttcttaaatttctgtttgattatttttcacatacgagacagttaatggtttttgtatttgattttgtaactacctttctaaacttgcttaatcattttcaaatatattttcataattttaagataccatcaacttatattgatcaacattttaaatactttaggaaaatcagagaaacattgctacattaaatacatgcactgattgtacaatgcattctgatgttttaaaaattcagctccttagaatgaagatgtgattttataagcagaacaaccatcttatagatatataatgttaataccattctgtcctcctagtttctcctcttattcctcttatttctacatgctatcattgctgatattatttttgattttaatgagaaggcctctagtgcagtggtttttaattaccaaatttttctttagtatgggggaggtcagaggccttttgaaaatctgatgaaagatgttcattccatcctccagataaagcaaatgtgcactcacaatctgacttcctgagccttcaaaattctctcaaccgtctctatataggcttccaccaatcgccaaagtccatgaaacctggttcaggactcctctatggtattacctcttagacgaatgttaaatgttaacatcgattacatttgcttggttaggacatcctctttattcatcctctttatttctttttttttctacataaagttagtaattagtgttggattcttttcaataccattcaggtatcgcagtaggttgtatcattcctcccatttcttcagccttctctgtacccatgatttacagtgaaaccttacagtttcttctgtgagaggaagagtggatttttctgccctgctgttattgggaacagatatgtgacttgcttaaatggtccaaattgcaggttgaagccaggctgagatgaatccagcttagatcagctgacctccagctgacccacagacatggacagtatacatttttgttgtttaaaacatctgtattattcagggttctccagaaaagcagaactgataggagatagatagatagatagatagatagatagatagatagatagatgatagatagataatagatagatagatagatagatggatagatgacagatgatagatggatagattatagatagacagatgatagatggatagataatagatagatacatagagagatagagagagacagacagatgatagactagatagatagacagatgatggatatataatctatacatagataatagatagatagatagatagatagatagatagatagatagatagatagactgaccaatgagaagggggaattggttcatgcaattatggaggccaagaagttcttttacaggttatctccaagttggagaatcagggaagctggtagcatggctcagttcaagtcctaaagcctgagaacctgggagttgatggtgcacatcctacagtctaaaagcaggagagcctggaggtctgatgcccaagagcaggagaagataggtgtctaaactccagaagagagagagggcaaatttgctgtttctttttgcttgatcaggtcttcagctgattgatggagtctaccctaactgagtgagagtggatcttccttactcagtccactgattcaaatgccaatctattccagaaacaccttcacggatatacccagaagtaatggtctaccagctatttgggtatcccttaacccagtcaaatgggcacctaaaattagccatcacagccactgagtctggggactgttttttttaaaccaacttttgcagctaaccaatacaggtatctatttatttaacagtgtagtatcattccctcgccacataacagactgtcatcatctcagtgactcagaacagcacatgttttccatgggtcaggtgtccagcacggcttagctagaccctttgctcagagtctcataaggctgcaatcaaggtaggagctgggctgtgtttctatctggacttttgagttgggaaataatacactgctaagctgaatcaggttgttggcagaactcattcccttatggctgttttgccaaagtcttgttgttgttgttgttgttgtttgtttgtttgttttgtaagccgtagaccaagaaccagtctcagatcctagaagttgccctcaggtccttgccatatggcctcctctgtaaagccacatctcacaacaaggcagcctactttttcaaagccagagagagagagagcatgcttacctctgttgaagactctctgccagttaggacctcctgattaggtcaagataatctcttgatttattcaaactccactgattaggagctgtaattacatctgcaaaaccctttcatctttgccaaagattctattgattagaagaaagttacactttccaaccatagtcaaaaaacagggattatataatttcattgggggtcatcttagaattctgcctaccacaatcttgtatttaatatgcttaattatattaatatgttaatgtaatatttgcatgttaaatcactttgcattcctagaacaaattatgtttggttataatttataattcctttaaagtcctgctagtttttttccatgggtaatttcatttgtacttttgttctcctattcaaataagagattgatctggagtttctttgccattctggtgggtttgatagcaaaaagtgaaactaacttcataaaacacatttggaagtctactgtatctgtcagtgttcagtcagggaaacagaaccacctcaaatatcctgacaataagaatgacttgtagctgccttcttgtctttggtttcacagggggtgtgttagggaggtatttttggtgttgaaactttgggatgtaatctagtgggtagtgctcaggtgtattggtcagctaataggctcttgctcagtcatgtggctccactatatttcctcatagttgaagccatgctccctctcaatgctctgaaagtgtgggctcctctcccacttcagtgctggctgtagatagtggcatgacactcctgggctgcccacttcagctctggggtgatctcagggtttatggttcttctccaccttggaggcagcaaaggaagggatcttaatagtggttgtgaccaagggtctttgcgtgtctcctgaggacttcaccccagagagatgcaggtaagcgattgctcagtgcaatcatcccggataatcattagagaaatgcaaatcaaaaccacaatgagataccatctcacgccagtcagaatggatattactaaaaagccaaaaaagtaacagatgctggtgaggatgaggagaaaaagaaatgcttatacactgtcagtggaagtgcaaattagttcaaccattgtggaaagcagtatggtgattcctcaaagagctaaaaacagaactgccattcaacccggaaatcccattactgggtatgtaaccaaaggaatagaaatcattctaccacaaagacacacgcatgtgaatgttctttgcagcactattcacaatagcaaagacaaggaatcaacctaaatgcccatcaatggtagactggataaagaaaatgtggtacatatgcatcatgtaatactatgcagccatacaaagaatgagatcatgtcctttgcagaaaaatggatggagctggaggccattatccttagcaaactaacacaggaactggaaaccaaatactgcatgttctcacttataagtgggagctaaatgatgagaacacatggacaaatagagggaaacaacacccactgggtcttacttgatggtggagagtgggaggaggaagaggatcaggaaaaatagctactgggtactaggcttaatagtgaggggaggaaataatctgtacaacaaacccccatgacacaagtttacctatataacaaacctgcacatgtaccccaaacctaaaataaaagttaaaaaaaaaaagaatgagcgtttacatggacaggaaaagatctagtaatgtaaagggtgaggaggagtggggaaagttggaggatcagggaagcctttgttgacctcttgagcccggctgcctggctggatgagcctgagcttgtggggaaatctgaaaagcacacacacccagtcactgaagtgggaccctgcagggggagctcattgcagtggacccacagtggaaactgttccctctgtaggaaccactgcctctgcagacctacagctaagcacttgggggcagtcttggcggtgctatgggaagatgagctggccatagagcaagagcaaggtgaggccatgctggggcccaacaggcagctcagcatctatctgtcagcgtgtctgcccacaccaacctctgataatgacctctgcctccttcccaccctgggaagctcacatcaattcctccttggtcattctgggaaatatcatttggggccttagacaagaactgtagtgccaagttgacaaggcacaagtcagtcctacctgtcatgttcttatgtctgagatgatccaggcagcatgggaagatatattccttgaaagactgaaagggcttgcctataaagttttggatgctggacaggatcaccaagaggcaagaagtgggaaacacataggaggcagctcacagggcaagcagggagagggaggattccagacaatcataactctccacctgtaccagggagtgctgactggagctgagtgatccccacagaggtggaatcactccttggagcaaaggacaagtaggtccacactcagagagtgcatggaacgggaaaagctgctttccttcaccatttttacagtattaggctttctttgtcaactattaagcttttcctttttgcttggtttgaggttttgactaaaggcaaagaaaattgtctttaatagaaaagttgattgagaggctaaggcaggaagatagcttgaggccaggacttcgagaccagccagggaaacatagcaagaccctttctctaaaaaataataaaataaaataaccaggtatggtggtatgtgcctgtgatcccagctactcaggaagctgtggcaggaggattgcttgaggccaggaggtcaaggctgcagtgagctgtgattgtgctattgaactccagcctaggcaacagagtgagaccatgtctctaaaaaaaaaaaaaaagaaaagaaaagaaaagaaaagatgacctcattgactttaattgccattttgtttttgtttcagtcagtttattaagtaatatgccactctttcactgggttctttgtatcatgtcttatgctctctgaattatcttttcttcaaatgtttttgctttaattattttaatttacacaacagacaacaattctagcagtagttttctttaaatttagagaaacaaaggtttaagtggtattaactgcttcaaaaaatagctcttgcttcatagttattttaaattccctgtctgataataccaacatctttgccatttctgaatctatttctaacacttgttttatctcttcagactgtgttttatctttctttttagtgggacttgtgatgttttgttgaaagtcagatatgtatggggcaatagaaactgtggtaaatcagcctttaatgtggggatttatgttaatctgagtaggagttgggctgtgtttaatgtttgctgcagctgtaaataacagaagcttccagttcctctagtgtgcttgttttgatctcacctcttgactttggacttccctatggactccacctcagagagtctgcaacatgcaacattttccgttgttatccagtgttacgataaagtgtgatggtaacatgttgtggcaggggaccattctataatctgatcaaatctcagtattttggtggccttgcttctcggggttgtgacctttgcaagtgttgctccacttctagaatgaataaaacagtggtacagttttcccctccaccccctactccctttcctggcttcagtattcccaaaccatttccttgaagcccagatcccagatcctggctgacagtgttccaacctctacccttttttaggtaccataggaaggctggaggggcctgaagtggcagaccctttctctgcctgggatcaagcttcagaatggtgctctggatacatccttttccctggagagaaactcttcgaactggagaaggctctaggtgtatgtcataatgattagtcctggtaagagccatgaggaaatctcaccatgagaacttgttggggtttctggaaactcacagagctgtggggttcttcctaagacttcagcccctggagttgctcattctcacaccagtccactttcaacctccagcaaatcaccaaagcagtcatctaatgatcctgccagtttatgcctcctatggcttcagctccaggcaagcaaatttttgttgccatgtctgtccagatacccctgtctttccaggtctcagcgtggctttgccctgccacctcatcaatgggtcaaagaaaagtcctttcttttcagtttgtccaactttctgttcttgttgggacaaaaacgttgacttccaagctcttttcttgttggagctgaaactggaagtcctcattaccctttaagatagacacaaaaaggaatcttatatagattattttgactaataaaatgcagatccaactgcccattgaacatgttgtaatcggtatctctgggttccctgtgtcaatgttaagtacatctttgtaagtgtgttattttttagaatggaaagagatgccaatcagggcctagggggaaacactgaaagctttggcataggccatgcctattacagtgtgaattctgggcaccttctcctttgtctactcttatgcatcatcaagcgagacttcatggcttccttaaaaaaaaagagagagaaagggttattagtgggatcacagaacaaagacactctagttcatgcatctcatgtgcctgggaaagacccagcaagataaagagacacatgcaaagggaaatgtcagaattttaaaataagcaataaatcattaaaaataatagttatttttcagaaacaattatgaaaaacataaacatagaaataaaccaaaacaagaactgagatgcaaaattgcacaatggcctgttgagttaagaagtgaaggtcagggagaccccatgatctcagagcagcctatgtgtagcatgccttggcattcaggtcaggcttccccaagacaagctaggcgtttgcctaacatggcaagactggagagagtataaggaggaaggaagtaacactgattaaacatctgctgtcccacatttctctcactcatccgtttgctcatttgaatgaattattaaggtcatgctacatgccatgtactgttcttggtgctgctgatagacaaattagtgtgacctggtgcattctcttgcgaagcttatcattcagtgtggaagacagacaggtggccaggtaacaacattccagggagatacgtgctaaaggagaagtctgcagatattttcttggaatgcccttggaggagtctgagcctgccagggttggggcaggggatgccaggcagaggattccaggcatagcatcctataccaggcacatgagatgcaagggaagagagtgagcatggggaccaagagtgaagagtaaaccaggcaagggaagggcctgtgtgaagctccaaggcccagggtgcaggggagcatgacttacttgagaattgttgggttcaacatggataccacttaggcagctgctggtaggtcaggataatgccttcatccccggacaatgggagctatgagaggtttcagcaggacagcctcatggtcaggtttatgcttcaaggagaccatagtgacaattatatatgaaatggattgggtatataagactggtagcacagagatcagttgacaaccccaggcagaagtgagagaggctcaaaataaggattagtagtggagaaggaaagaaattaaagggttgaatacatatcgagaaggtaaaatggcagcacttaatggccaatttgattggggacatgggggaaaggagctcaagtgcatgacccaggtccagattgtaaggaatggagtgatgggtggttctatgtatgaggagcaaggaggaactttgtatgaagagcaaggcatttttgaggggatagggaagatgatgactacagttttgagtgtgttgatgaggcttccagttggatgtatccaaatttggaattgaggagagatctaaacttggaagctgtcataacctagatgaagggatttgaagcagaccctgtcattgccccaccaatactccctggcccacccagaagttgctcacatgtggctgccattcagacctgtggctttctgtgtctctctgcctgagacattctctggttttggcactgcctggcaccagctagtaagagacagaacgttctgggaggtgacccctcaggaacaaccttcagttgttgagggagggacactgttagataaatacccattttctggccccttggggagcccatctgtgtgcattccacgccattgttcctcaaagctgagcccaaccatttcccctggaaagactgctaaaactcagattcccaggccttctccggagactctgagttattaggcctggttgggaggggaataagatttgcatttctatgcacatgaaaaccacaatgagatatcctctcaccctagtgagaatggctattattaaaaagacaaaaaataacagatgctggtaagaatgtagagaaaagagaactcttatacactgttggtgggaatgcaaattagtacagccactatggaaaacagtatggagatttctcaaaaaacttaaaatagaactaccattcaattcagcaatcctactactgggtatttatccaaaggcaaataaatctgtgtatcagagagatatctgcactcacatgtttagcctagcactattcacaatagcgaagacatcgaatcaacctaagtgtccatcaatggaccaatggataaagaaaatgtggtatacatacacaatagaatacttttcaggcaaagaaataaaaacaaaagaatgaagtcttgttatttgcagcaacatggatggaactggaggtcattacattaagtgaaataagccaggtacagaaagataaataccacatgctctcactcatatgtaagaggtaaagaaatttatctcatagagatagagaataaaatgatagataccagaggctggttgggtgtgagggtgggaggaggaaatgaagagatgttggtaaatggatactaacatatggctggatagaagaaaaaagtgctaactatcaatgctaggctagggtgacagtccttagcaaaaatatattgtttatttcaacatagccagaggagaggacttgaaatgttcccaacacatagctactgaaggtgatggataccccaaataccattatttgatctttacacattacatgcatgtaacaaatactcacatgtatcccataaacatgtaaaatattatgtatcaagaaaaggattttttaaaaaatttgcatttctaacaacctctattttgcgatatctctcagcacaaacccaaggggtccttcccagtttgcaggagaggtaacccctgtttaacactcacttcattgactttctgtctttcctatctcccctccctcttatctggcttcttggcatcacactccaaatgaactataggcacccaaatccttgtctgaggtctgctttgggcaaatcctaaatatgatagccactgaggcccctgtcttatgtataataaggggatgcttggggaaactatctcagaattgtcatccaagttgggacacatgggcatgcatgagggacactcaaggtaacacggcagcttggggattgtgcctgattcctgttcccctcttagaaatatttctatcacagcactattcacagtggcaaagatatggaatcaacctaagtgttcatcaatggatgaacggataaaagaaaaggtggtggatatacacaatggagtagtatgcagccataaaaaagaatgacatcttgtcatttgcagtaacatgatggcactggaaataggatattcacagagagagggacagacatttcaacaggcttagaagcctggcttactgactgatatggtttagcagtgtccccactcaaatctcatctcgaattgtagcttccataattcccatgtgttgtgggagatacctggtgggagataattgaatcacgggggtgggtctttcctatgctattctcatgacagtgaataagcctcactagatctgatggttttataaacgggagttcccctgcatatgctctcttgcctgccaccatgtaagatgtgcctttgctcctccttcaccttccaccatgattgtgagacctccccagccatgtggaatggtgagtccattaaacctctttcttttataaattacccagtcttgggtatgtctttattagcagcatgagaatgaactaatacactgatccatgatattaaggtctgtgggaggaagtctcaacaaccatgtggagatggggcccagttctgtctccattcactgtacttcctgctcagtaaggaagcattagttattgttgttgttgtgtagcttttgagacattaataaagctcagttattgttattgttattgttgttgctgttgctgcagcaataatattctgttattatagaagcttcagggagtcagtgttagttattatcattgtcattgttgacatcattctattaggccctcaaggagtctactccttgaggagtggtgcaaaattctatacctttttttgaggagaaggtctacaacttttatcagatttttcaagaaacctcctaagagataacctttgatttagagggtagtttaagtccatgagaatcagtgagattgaatagagaaaaacagccagacacagtggctcatgcctgagatcccagccctttgggaggtggaagtgggaggattgcttgagcccaggagttcaagaccagcctgggcaacacagggagactcatcttaagaagactcacctctacaaataatactttttaaaacattgttaggccaggtgcagtggctcatgcttgtaatcccagcactttgggaggctgaggagggcagatcacgaggtcaggagatagagaccattctggctaacacagtgaaaccccatctccactaaaaatacaaaaaattagccaggtgtggtggcaagtgcctgtagtcccagctactcgggaggctgcggcaggagaatggtgtggacccgggaggtcgaagttgcagtgaggtgagatcacaccactgcactccagcctgggtgacagagcgaggctccatctcaaaacaaacaaacaaacaaacaaaaaactgttagtcaggtgtgagttggggtggcacgcacctctgatcctggctacttgggagactaaggcaggagattctcttgaacctggcctttgaggctgtagtgagccatgattgtgcccctgtactccagcgttggtgacaaagggagacttggtcacacacacacacacaaaaaaaaaaaaaaaagagagagagaggaacagttctgtgtgcagattgctaagtgagcagggtcaagttcacagtctggaggcagcaacacacaatggtgagcaaggagaggtggtggtgtggatggcagagggaggcatgttcataaaagaagaaaactgccaacggtggcgagctctctagagaaacaggcaaggatgaaagcagaccatgctcaaggcatttcaggaggatggcgaagtcaggaggcatcccaggatgacccaggcactgtagggcgtgactgagaagaaagacagccccaacagaagatgccaacaactctttcagcgagagggtttgaggagactctgcagctaaaggagggaggtgggatggtggggagggggaatagttttcaaatgatggaaataaaaacaacagtggaccagaatgttcacaaaagacataacatctcttcatctctgctttaaatatggaaaatgagtctcaagggtgtaaaaaaaaaatgttcagtttcacttaacccattgatatggtttgactgtgtccccacccaaatctcatattgaactgtagctctcataattcccatgtgttgtgtgggagggacctagtgggggataattgaataatgggggcagtttcccccatactgttttcgtggtagtgaataaacctcatgaaatctcattgtttaataaggggtctccccctttcacttcgttctcacttctctcttccctgccaccatgtaagacatgacttccaccttctgccatgattgagacctctgtagtcaagtggaattgtgaacccattaaacctctttttctttataaattacccagtctcaggtatgtctttatcagcagcatgaaaacggactcatacacccactaaccacagaactggaagctggcttcggtctgtctctctttggagtaagctgtccatggcataatatttcttaatagtgtttgtagtcacaaatatccatctttccatggctaccatgctagatcaaattcttccatagggttccttgccaccgtttcattacagctctttctcaagatcacttttcagggtgcaaggaccccaggaaggcgtcattgtaatcaaaatgtgtggatgggtctggcatcagatgtctccctctgacctaaggcaggaagctgaaggcactgggcacctggggtaaagcagaggaagggcccagaaagtggactagacagacagccaccaaagatgcagtgccactggagttttacctcaatgggacttgcagtaatgacacccacgtcttgtttccttcttttgtcgtttgatgtcttggtgaagttgggtcagtgctatgctagtagccttctccagaggtcaggggacctgccaggacaggaatagggagtgagttctaggtccaggcaaagccatacagtgggctgggctgtgacctgcacgtccatctgtggctcacctagggagagcagctgtggttcatgcgtgaatgggaatattgcagtcctcacatcttgcagaagatgctgcagaagtccatcctctgcttgttctccatgctgattcgggctagaaagagcttggtcaccaagacatgggaagatcatgcaagagcgtaaaacagaaggatcacaaggctacaagcaaaaacaaagccaaaatttgaccacagcagaaaatcagctgctaaacgctaagaaaggctagatcctaatgtgtgctcattgtctctggaagaatatatctcttccctatttgagaaccccctgcctccctgactctctcctacaattagggaagaagtgatggggaggacacagacgcaagactgtaaactgagtaaatccctgatgccacagagacaaggtggaagggaggcactgtgatggcaaggtgacttagcaagcccagaaggcaccaggccggctttatccagcaacaatcaacctggtatctgccacaaaaaagtaggaaagaaaatcgggacttgatccaaataaatctatcaagtatcaagtttggcatgaataaaaatgcacctagtgtatcattgacttttgtatatctgaactccaaacctaaccagctggaataccctattttaagtagcatcccattcgaccttccaaaaggaaggcaagttttagcaggttggaagtcagtgccttaaacagtatcttcttctctggatgcaaatgagagaagtactgatctactccatggaagaaaaaaaaatcagaactaagccccaaaagccagaactaagccccaaaagcaaaaaaaaaaaaaaaaaaaaaaaaagaaagtaaaaaaaagaaaaatcagtgtgatggtttcaccatctaaagagttattggcaagttagtggtccatgtcctgtgaccacatcggttctgctttacaaagaatgcgtcaatcctacagtcttcacagctaggaagtaccgggtggttatagaccatcagagcgcacatgagcttgaagagtggacttggtttctgtccaggttttagagctcataatgaatgatggttgccaatatgggctcagacagacctgagtcagatttctactctggggcttggaggcgctcagtaacttgctcggtaccctcccctcccaccacaggactgtgattctgccccggcttgcaggacttggttacagacagatgagataacagctgcagacctcttggctccgtgtctcttcccttgtaggtgctcagtagctaagtagatacccgttctattttcctctaaattttccttacaatttaatcattagcacaggtctctccaaagagcaatttatgttaaagaataattttaaggcattcaatttgattttaatagtcatagctaggctgtgtctagtttgtgattttcaaacaaaaccaaacagaaacacaccgtttaaaatgagttaagctgaaatgagcccttgagtgaagctaagttggatacattttgtatgtcatagaaatgatgggagggaaccaagctgaggtatgttagggatgaggttagagactagaaaagaaaggggagtgaagcaaggggttctggtttgggagacaagaaggctgttttcaaggtagccaaaaggcataaggaaataaggccatctccctgctgtgccctgggccatcttcctctgcccatcagccctgcttgggccaggtgggcaggatgagggtccttcactcatctgtggagccactgcagtccctccagccgagctcttctaccccacccagcttctcttaaatctacctcttgagaccaaaggaaaacatgattttcatccagatgaaagtggtgtgtgtatgtgtttttaactgttgctgaatttcacatcagaaattagaagccctaaaaattaattttaaccaaacatactcactttattctttctcgctacattcatcttttctgtctaatactgctatcacttcctgagaacaagaggagaaatattagatccttcagttttaaaaagtaaaaagccatggacagaagcatgcccttctcctttggttcttagcattctggaacgcacctgtgttaaaatatgaagaaataaaacaaatataaattatgcattttccaacttaatttaaaatgcattatgctttgctttgttctctggaattagtcttattaaggggacagatctgtatggattaattttgagtcagtttattcacttctttgtaattcagtggcaagaatttttgtccccaggcatcaaattaatttttttttttttactgtaagtaaaacatacaaaatgtagacctctttgtgttatttctttgtttacctggcatgcaacatattctcatattatgcttccaccaaatctgaaatcttctccctttaaacaacaaaactttacccacaatttttaaagcaatgtaacctttgtcacaatattggagttgaacacaataatagcattattctctggttgtattcatttctattagagatcttcatggcctccctctaacccaaactcaaggagaccagcccccaagcccctgcctccccaataattttgtcaacatgtgaactgatattttatggctatttaaaatgggtactaaatcatcattcttaagtattgttttagtacagtaattctttgttctgcttcgacattttaaatctttatatttttcctccctacacggagcaagaaaatcgtctgcattcttaattagtcttctttaaacaaaatatcctttcatatgcactaataaagactaaggagccttaccctcttgtttaaataactgcttgctgtagtataaaattgtaagagaaacgatgcagatcaagttgcgggcttgaagtggggaagaggaacaagccgtgccataataagcagattttaatgatttactataaatcagcatttttgccctgtcagtgagattgaagaggcagacagctcctcacatgtctgccgagcaaatgccttcctgatgaatcatgtgcactgaatcactgatcacaacattcaaacggcacatccaaataatgagggaaacatatacacaggctcccgatggctgctccaaggcagcaggaatatatgtttttccgttgtgtggtggttaaacccctcgcattgatcctccgaggactgcatggagggtaatagaagtgtatattacccggttaaccgctggtgcccgaaacacaggctgatctccataaatgctctccccaaccccctagactttcgatgaggatctaatctggtcttgaggagaagggaggaaagcagaaaaaataaaaataaaagacaggctgtaataatgaacttgaacgtaaagaatctggctgcaaaacccaacagaaattggagctaatttctggggactggtcttccgatatccccctcccaagcctctgcccctgctgtttgcttcctctgctagtgcctaataatccccagtggtagtgcttccggtcggcaggatcatctctggggagaggagtgccactcttcttgttggaaggacccatttggaaactgagtatggaggaccccccgacaggacagtggtccagagagccaggcccctagagcagactctgaggccatccctgacctggacttggagatgttcaggaagcctttccagcagaccagaggctttccctgatggcagccttcagggcctcactcctctcgaccgccgcagcccaacatcggcagctctctctggtgctgcttgcttcttgttgtctttgtaacactcatcctcatggactgtggcttcctcagttgcaaaatcattgttttaacttttttggaaacccttaaaataacttgcacatagtacaggcttttccatcatacacctacctccatgagtaatgaatgaatgaatgacagccacagaggccgggtattggccggccacactgagccggctctctaggacacctcactctccgagaaaacgaggacgtccttgagcctaagacaatcaatttctctttgccaaatcctaacctcactccctctggcatccaaagccctgctttggggccagctgggaatctacgagccctggtcccacccgtggacttacctggctgcctgactgcctggctgctgtggggaagatctccaagggaagtcccagctcaaactggagaggaaaagagggaggcctccaacaccagggcatttcacactgcattctcgtacgtaccccacattacatcccagtggtgctcccggaacacagatggggccccacagttccacactttctgcctctggctggaatgcccactcctcccctatttaaatatacgtattgtcaaaaatagagctccccttcctccctgaagccctgtctcatcttgtgcaatggaaataatctctcccttctctaagcccgattatgcttcagatatttcctttgttcattcattcattcaatcaccctgcctcacaccaggagatgcctggtctcttctggtaatggtgaaaagaagagtgccaccctacggggtggcggcggctgcaccgtccattcttcagtgtgcattgagcattcgctgtctgctaggcactgttctgggcccggtggtgacctagttggggctggacgggtcctttccaggaggtcaccaatccgtgctatctgtgtcctcaatcagaatcctgcacttaaaagggcctttccctggtttactgctctaatgtcaccatcacattcgtaacattcatgaaattcgtaacaatttttgaacaagagggcctgcattttcattttgtgaaatactatagcagtcctggcttttattttgaaggacttgaattcagggtgggggatgggagggagatgaaaataaacaagtaaacgaatgaacaagacatttcagatgtctctgtgtgatgggatggagagttgaaggagggctacttcacatggggaaattaaggcaggctggtgtgaggaggacttctgagcggagttgcatgtgatgggaagacacaaacataacaagcatgagataaaccagttaaccccatgaatgaaatgagccgattaaccccatgggttgcttcagtgacggctcaaccttttattctgttctggatgcttggactggtgggtgccttccttctcccaccctagagggaaatttttgggacgtacaggcccctgtggccttctcccgtagccagagacaggcagaccattaatgccaccaggaacaaggaggaacaccctggtgtgtgcactctggaaccctccagaagtccctggaaccctctggaacagaaacctcaccttcctcctcctcccctggcagcctcagcccctaggccccctgggccttctcggttcctctgtccacctgactttgcccaggaatctatcttccataggagatgcggggtcctacagacagccttgagaaactcatgcccaggaggtgctctgtctctgggcctaaggtttagggaaatggtgcagaccagccagtgcttgtgaatttcctcttctccttgggtctctagcccctggccccgctgtggtgtctcagagcaccctgatgggtttgcatcacagcctttcgcagcagccttccttggccaggtaagttaagtatgaattcttttacacaggactcatgattcctttaggtctctgtggagaacgggagtgaggggaccagggccagagctctgccctcccacaatggcctctccctgtcctgttcaggaacctctcctgccatttgagcctcaggccagctgtctcgtggagaagacagagaaccaaaccacccattatcccacctggccaggaggacttgagatgacagattagtgcagcaccaagcacagtggctggcacaagagacccttgtcacctcctccaggctgtcttccttcaataacaggctccgttgtcatgcttgggtactgccacagcagtcactgattctctactgtggcatgctcctgatgaaattcaacagttgggacaaatgggctagaaagaaacctctctgagggcagaggccttaggtgccacaatgcttacctggacctgatacccagcaggtgtgcagggaaaggtatgcagaagagaaggaaggggatggcatggcatgcacagcggcagcacacaggctgtgtgtgggcagtgcccaggaaggaggtgcgtcaatacaacaagggttgacaccaagtgcagtgcagttgaaagccacaatgtaattatccacccaggaaaagagggtcccctcccatgggactgccatccatgtgaagagaaggaaaataaactcattcaaggtcaatttaaaggttaaatggaggtcaaccggggggaactgagaccatccctgtcaatgggagcagtcttggccacttacttaggactttaacctttggctttaacattcatctgaaaaaaaaaaaaaaagtgaagcagataagtgggtattagtagacataccattttagccatcttagaaaataaaaaataagagtgatcgtggatccagtggcagttactttagaaagatagtaatgtgtaattcccagtttctcagactgtaacttctgcacttaccactaatttctccactgctccaattgcagtgtatacatttagtttacaatttatcatcaccgtttgtgtatattacgccagcagcataatccatcctcatgaagctaatgctcagcattaggaaaatggactccgtatggagcctgccagactctggcctcaacacagaccgagttgcaggttcctgggcccccactccccccaccccagagtatatgtggcgttatgttttgtgcactctctccaaatggcacggtctgatttctgcaagttgctggtgtccattgtctgtggatgtaaaaatcaatgacctacatacgattttgattttgcactgggaattgagagagagagagaaagaaacattgagagagagagagagagagagagaaatgagatgagacgcaaacggaaaataatgaaacagtcatgttaagaaatatattagcatgttggactcaaaaaatatatttccaagaggatatcctttttttttcttccaacaggaacatatttaatttcatggtcatttgattaaaacagttaattgtattaatgtgttattgagctgaaagtgctggtcattccgggatggacgctcactcgggcgcagagaacaaaacctcgtaattccagggctctttgggagctggtggaactaggacctgctattgaaacctctcagtggatattcaatccttgtttttattttcttaaaagagagagagagaaaaaaaagcctcaaactgctgatttctgcagaaaaatctgcaaatgaactgttctattagcacaaacataccaaagtctttagaacccctctcttcaaaagcataattaggtatttatttcagacatactaacatctttgcagtagctaataagatgcagcccatttgaatattaatataataaatgattaaattaaacagcaagattcagactcagaaatagcctttataggtcccagggggtcactaaaactgtttccatttcttcctacagttaacatagtgcaagggacaggaatgcatagagcaatatttgtcttatgaaatgcggagttttatatggtgctattcagttttattactccacagtttgaatctggggcccagagtgaagtcaccatgctgtggtctgacagcccctcttcctgtctcactgcttgctggcattccagagacgctccactgcttggcaaagagtcctctctgatagtctccataccaataggtactcatggagctgggcacaaggtaaactcacaatatgattaaaggaaacaaaggcaaaaccccaaaaccaactgacgctgcataccaaactgcccagggtttattttgtgtgtctacgtgggtgtgtttctcgattccactgagctcagtgtgtgtgtgtgtgtgtgtgtgtcggggggtgggtagcggggcaggctgaaaggccacacccaaagctggggtgtgggctgaagccagatgcaccaggatgtgggcaggctcttcatctctcaactaggagggacccccgcccacccacttcacgcgcacaaaaaagaataggcaaagtccacaattataattggcgattattccaataaaggtataaaggtgtttccctttttaaattagttcatgaaaactgcacagtctccaaatcccatgaacctgagatgtgttaataaacatctggccatggtttttgcttaattagcattctctagtttggacggaagtctgtttatataaaacaaaacacacacacacacacatacacagattctgttttgtaagccacagcccctcagaaatccaaaacgagcctcccctaatgatcggagagagatttgggtctttccatactcctatttgtcaactgagcagcagaagagaaaagatacttggatctgcatgtctaattttattatgcaagtctcagatccaatatctaataacttgatatagtcatgctgtttgaaaatattcacatttttggaatagaagatattgaagcttgcaggtcagcttgcattaaatagaaaacaacacaaaccaacctcaagcatgtccacggtccacattattattatccacagccaaaaatctccccgccctatctctctaaggagcagcgtcggcagggaggtaatggataaaccataacccggcttgcaaggctttactgtctaaattagataaaagaaaagtaggaagaaaactcaaagataagtggtacaaagtaaatcaaaacaaatcatcttaccaaactttattcacatctgataccatttttagaaattaaggtcagttttgtggaactaataggaagttatacctatatatcttggacaccatgacaatgccggggtggaagatttatacaccatggttgcagatgcagaagaaagatatgagagatcaaatggaagtgcatgataacaaatgaaaaatggtccccacagcccataaattaattgagaaaagaaggttgtcattatttgaacatgctttaaaataaggtatggagtccagatggctgaggatagataggcccacaaagtttgagtaattgatgacttaaaaataaaacaagatcttaaagaaatgaatcacgttgggcaagttagaggaggaatattataagagaaaagatgagatttaaaaaaagcacacaaagcaaaaatgaaccccacatctctggaaccattaaagcccaatgaaagcataaaagaaaaagtgagttcagggggattcaaaaatgggggagagggcaagaaggtgggcaggtcagaggcaaaactctaatatggctatgtttcagatgctatttcattaacctattcagctttgttttggcttttctgttgcaaacatatgccttttcctttttttttttttaatggtatctaaatagggctaccctaaggtgggccaccaaggttgcaaataatagttttctgctgctgcctcttaagctaatcccccactagaaaattcaaaaacaatttgcctctgggatacctctgttgcagggtgtggggtagctggcagcttgagaattttcttggggagttggggtttgccaaaagcgcaaactcaattgattttccacagccagagtagaccagaaccttccccaaggagaggatatcatcacctagataagcccatctcctttcctgccccctgccaatgggaagaaggcgcttgtcttcagtaccttctcctggaaatggtatttctgctgtatccagatgcaaaatgagttctaaaggaacagcaaatgctccctccctccttccttccctttttcctttcttcctttcttctttcctttctccctccttcccttccttctttgccccttccctctcttcttccttccttcatctcttcctccctctctcctttttccttcttctctttctccctccttccttcctccctcctttctccactccgtccttcctttcccacttcttcctcactctctccttccttcctccctcccttcttcccttccttcctgccttccctctttttttcctggctttttttctgtttctttctttttcttcttcttttttccccagaatctcttcttttttcttttttgacacttctttctccatctttctaatcactacttgtgccaccatctgtaatttcccccatatccctgaaatacaggaaatggaagcagcggtgcagcgtattccatatttatgacttctcagtacattagagcatccactggcgctggagagcccccgtctgagtgcagctcggtggaaatgctctctgtgcagccaaaagaggccggctggggcaggggaagcctcggaagtatgctaatcatgcctctcaaaggcttcccatgagggctctacttggtccttgttttgaaaatgtatttttccctctgcttctctcctttacacgcatatatatttttgccctcaaagccagatatttgctgttcacactaagagagtattatgaatattctgaatgcaaagatagctctgggataggacatcaggcacggaggtcggcatgggtgtacacagcccctttatttacccagtgaggaggcaggctgcattatcacaatgctctcctccacatcataccccgatccctcacattaaactccttggcaactgattactgatgacaaaaaatatatatacagctgtacaattccactggctgctaggaatgtacaaccacagactacctttccatgctaaggaacatgcaagtgtgtgatgcatgtgtgtgcacatgtgtgcacatgaatttgtgtgagtgtgaatgtgcatgcatgtgtgtgcatatgtgtttgtgtgagtgtgagtgtgtgtgtgttggagcaaaatacttgctattgtggcagtataaaggcaaagtttaaaaagtgtctcatcacagttcactctcgtgttattaaggtgcattaatctccaaagtgagacacacacaggataaaccaaaatatgaccctaagtgctgaaggcaagccaacggacttggaaataatctgaagacagaaatatataggcagcaaacatttcaagagaaggagacttgccaggaggattgatttgaatactctgcctggagatttattttgccttattgtcacaaaaggcaatgccctgcccccagccacccgccccccgcttcaggcagtgaaggagatggcataaaaacctctttgaccgcgtggcgatggctatgtcttagtagaggctaaaaatggatgagaagtatcggagaaatgaacttctgcggttttcaaaaaacggttcagaatagatgagccaactcctttacatgttcaaaagaaagagggaacaattttgtgaaatgctaaggcagtgcaaagtgaatgttaaatagtttttatccaccaaaaaaaaaaatagacttattcaaatgcatgtcttgcttgtctttaactaaagtgaaatttcttaaatccagctgtagtcttatgggtggtgggaggtggcgggggtgggggacagcagaagcacagaacgtcttccttgaactgaacatcatgtcattttaaaagcagaggcacacacgctattgatttttttttaatacaaatttggcagatttcacatgatccattacatttctcaggacggttaagatgcagcttgcatgatttattcagaataaggtccatttttagctatatttaagtctcctatttgttatttaacatgtgtttaatgttttctgcccctgctgtgcacagctgcaagctgctattttttggcaatttttgtgactgggaagtgatttgtgtctttgcatctcacctttctattctgtgggcctgctgttttgattttttcctaaactttgaaaaataagttgctctgtgtcgcgacctctgcttcactttgctgggcaaacaggaaagcttaaagagtacaaccaaccatgacagacctcttacagagtttttagaacaacatcactgggaactgaaatttcaggaaatttatattttaaaaaatgccaagttttcccatcccagcccctcagaacggattgaagctagcaatttggaagaacgtccgtcctccagtgagaatgtctgtggtgatttaagttgatgctgacatgattctgcagggcttagccaggtaggaaccaatgtggtacctatcacctatcgaggggaaaaggcagctcccccccatcccccacaactgttttagaaaacatactccaggattctggaggcacgtgcctcagcaacatgcttactgtaactgtctctctgaatccattcttccctgaaggagggtatgccactcagggctgtctgtccagtgccaggtcaaagatgcccctgaacccttctcttcccctgcacacctgcccagaccaacacaggaagtcagcaacagacacacattgcaaagaacagagcatcaggcttggacaaagagtagtccaaccagcctagtttggacctatcatatataagtaaaaagtctgtaagtgtttacctgattccatcagacacgacgatggcactgagtggcccggtgatttatttttccaaagcccaaacgatcctgcttaatattgcttgatatgtgctaaccttccctttgcagggcctgcaattgaaagccatgcagcagtggtttaatcctggcctcttacttatctaaaacacactctctgactgtgctgtgaaaattgaatcttttccccacaatcttactgacatgaaaaatatataatacagtaaatgattaatgcagttataaactatacctgagataagatttaagtattcatatttctatcatgttaatacaacacgataaacccatgaagcaaacttgaccggggcatttgttattctgtccagtgttcaattattctttgtccaaatacaatttaggggcttgctgtaatgcagtcacttggtgaacacattatgtgcttctgggagataataagctacatcgatggtcagccgaggagatctgctccacagagacccctaccaaacaccagggaatatgaagacagatcgcatgggccctgggcccggggacaggccccctgaaaagatcatttgcaccagtatgccagcctcgtttcagccacccttcctcccttttataagagagtctcccgttaaaggcaaacttatttgccgtaatcaaaaggaagcttaacaataagtgaaactgcttaaaagctgccttcgcctaacgctgaatatggtttttttatctgtgactgtagagaagccatttctttgttggctctaaatggcccccattccttcgttgtgcaaattgctcacacgcgccaatgtgccatttaccacccacctcattatttttatacttccgatgatgtcgattttgattttcaaatgccagccatttatagctcattctaaaacacacacacaaaaattaagtgattcacaatctctgccattagctgggctttgggggcctctaagttgaggacaagcagtatagcacagtggccacacacctgcgtgtggtgtcccagatctgtccctcattagctaagagaccctgaagaagtttcttcacctctgtaagtcttagtttcctgcttaggaaggtagaatcgtgctttctacctcttaggtttgaagggcaatcactaacagtatgtggcatgtaatacatcctcaacaattgttaataatcactgtatggtcattatttcctgggtctcactgcaacaagtgagctgtccgtggacaacaggctcattctcaaagctatctgctcaaagctggacagggacccatggtgccacatcttgctccatggactctagaaattgctgctgctttgagagatgctttctgcccttggtattctgaattcagtgcctgggaggagaagcacttttaaggtccttggggacaggcaaggcagaagacattttgtaggaggctcactcagtaccctgcacaagtggatctcagtgtggatgtgaactctaagatataggggcattggaaatgcaaataggtgtgatacagtgtgtacacaatcttcctgggagtgtctgcacacaggtcctatgatcctctttaatttattttatttctttttattttttgaatttttctctttttagagacagggtcttgctctatcgcccaggttggagtgcactggtgcaatcacagatcactgcagctttgacctccagggctcaagtgatcctcccacctaagcttactgagtacctgggtctacaggtgtacaacaccacacccagctaatttttaaaatttttatagagataggctctcactatgttgcccaggttgatctcgaactcctggctcaaacgatcctccaacctctgcctcccaactttctgggattataggtgtgagccaccatgctaagcctaaatcacttttaattatgacccgtctgtaacaaagccaagtccccaagtactgacagagagctcacctgagtgggccctcaatgttcttcaaaattaataccaggagcatggaaaactcacgtttttttgaatctctctccaaagtccagccctctgtggtgggaaatggggaatccacccctcagatttgccacgcagtagacaagttgtaaggagaaagggacctctgcgtttgtttggggccaggatgagatgggccattggactggctcctggtggccagagagaaacaagaaatcagccagtctcctggtctacggacaggaagagacctcgggagagaagtcaagaaggttatttgatagattgaatgagccctctcggtgctggactgcaattaccttagggtggagattgtgaggtggaggctgtcttcatgcctactctatagaaactgacatattaatgcttcccttgtagagcttcatgaaatcaggtatttccacaactgcctttctagaacaaaacagctttacacacagagccctagatcctgatggatgctctcagtgaatactagcttttgtcagagtgaatttctttctttcaattgcaggatcagaaatatgtactttggaaatattgggaatgacatgcttggcatcacccttgaatgttcagtattaaggagggccctacagggaagggtgcattcaaggcccagagcccagccctcatccagctgctcgctcactgctccttcaggctagcaacctgcatatcgcccttcgtctgggattctcttttcttttcccagacctgggaaggaacatgcctgtgttttcgttctatgagactctgcctattcccataggagggctggccttgatgtgggctgctggcttggacaagagggtcctccatccccccaaatctcccctttctgctcttaggttttgaaacatttttaacaaggaaagatatgtcttgcttcgttggtgagatacttttaaagtgatgttagttttgaaaagggttcattcaccaaaactgaaaggagattttcttctaagactgttcttagcaggagaaagaggaaggctagaaatcccaggaagggtgccatattcccagcatcagtaaatatttgcttaataaatgaataaatgactctgggtgtctggcaaggatggataccacaggtcctgaaaaggaccttcccagaggcatttgtttcctctccagtaatggggagagtgctaggcatggaagaggaattccataaatgtttgctgaactgaactgaagaaaaggagagtctagcatggataagtccactctgctgacttcaaaaattgatgcaggtctcttgatgtcagccccccaaatactttcccatccttcgacacactggctctgccttcatgcagtggccacgatattgtccctgcccctttctggttctgactcttccgacattgtcagccttgctgtcaagatccttctcatgtccattgattcctgtgactctcattgcatcctctcctcagtccctcagttgataacttttaaacctaatatccatatttcccatggtcatcccatggacacaggctgggaccgctccccaaagccatctagaaagacccccttttctcccttctccatcttgacagcaaaccatcaacccaatgttaaggaaaggcacaaccatcagaacattttagcaaataacataggtgtaaaattgttttgtgatccaaccaccctggcttgcccatgactgtcccagtttagcactggaagtcccatgtccctggaaaaccgttggctctagacaaacctggagggttggtctgcctgcccagcaataccacagccagagtctactccaaaaaaatagacatagatgtgtatcaagacttaaccaaggcgcttttgccagagcattattttaaacatgaaaacactgcaaatgggctaaatgtccaacaacaaagcagcagctaataactattatgtctttgccatacagtaagccactctggtgccatgacaaaggacgtgctggaggaaggctgggagatgtggggaatatgaagagggatgtataatattgaagcataaatgatgcagactcaggtgaaggtgcatgtattctacatacaaagagtatacttagcactttgggccctggagccaatccagctaattaaatcatggctttgccctttactagctatgtaatagagggtaaattacttaattcttccatgccttggtttcttcatctgtgaatgtggttaacaacagcacctaccttatcaggcagtagtgaggatttcatgggttcctatacataaagcactgggaacaaagaccagctgatagagtttggatatttgttgctgcctgtattagtattctctcacgccgctctaaagaaatacctgggactgagtaatttataaggaaaaaagggttaaattggctcacggttccgcaggctcgacaggaagcatgatgctggcatctgctcagcttctggggaggtctcaggaaatttacatttatggtggaagggaagaggggagtgagcacttcacatggctggggcaggaggaagagagagaaagggaggaagccctacacacttttagacaaccagatctcacaagaactcatgggtgcaatgacaacactgagggggatggtaataaaccattcatgagaaacccccaccatgcaggtggtggatcacctgaggtcaagagttcgagaccagcctggccatcatggcgaaaccccgtctctactagaaatactaaattagctgggcatggtggcacatgcctctgatcgcagctactcgggaggctgaggcaggagaatctcttgaacctgcgaggcggaggttgcagtgagccaagatcatgccattgcactctagcctagacaaaaagagcaagactccgtctcaaaaaaaaaaaaaaaagaaacccctgccatgatccaatcacctcccactaagccccacctccagcattggggattacaactgaacatgagatttgggcagggacacagatccaaaccatatcactgtccaaatgacagtgctggagttggggcctggtgggaggtatttggattatggaggcggatctctcataaatggctttggccatcctcttgatggtgagtgagctcttactctgagttcacaggtgaacttacacctcccctacacacacactctttctctcactcctgctcttgcatatgagacacctgctcccccttcaccttccaccatgagtaagagcttcctgaggcctcaccagaaactgagcagatgctggcatcatgcttgtacaaactacagaaccatgagccaattaaacatattttctttataaattacccagactcgggtattcctttaaagcaatgcaagaacagcctatcaaactggcacagaataggcactcaacagacagttgctgctgctactggtggtggtggcagtggaggaggaaatggttattgagcctgtgccacatgtcaggctcaaagctaaacccttgttgtgactttcttcatttaatcctcatggagtccccataatccagtttaaggagttgccaaagctcccccactggtaaattgtgagccatgattcaagcacaggcccttaaagtcattactgagaacacccggcagggcactggcgagtaacgtgtgatagtgttgccatcctccatgcccaggctaacttaaccttggacaggagcataactgcttgtcagaatctcatccctgctgacagtcattaactttaaggcagcacagaagagagcatgttaagttaaactcagacctgtgcttgtcaattacaatgcctttagaaagatgctaccatgattcacgatggactcaacatgttcatgtcgacaaggaagactggatgtcacacgctggacaaaggtggtgtaaactgccagattcccagtgataggccaaggaattccaaagttaggagagctccaggtgtcaaactcatgaaggactttctctcaggtattgaacatctatctgcctaaagcctccaactgcctttcaagagaagacccttatcttcaaagaagacatgactgaattaaggggaaaaaggttactcaaaagtttaatcaaataggaaatgcagaccaatacctaatattctttgatgtgcttcaaagataggcagtcaatcatgaaagtgtttgaagaaatcgcaatcaagattaccaatgtgggatttgaagaggcagcagctcccgggaagtggggcatcactgctcatggccaagagtaattggacataaagaacgcatagattcaacttttgataacttcaattgtgatttagaagaacaaatcagaatgaaattgaatggataaatgaacatcttattgcgggctgaaacatttttctgttcaattcattagtgccaccccattcccaaataaagaagctctgatgtttcttatgactaatggtgttgtaatatttaggaaagaaggaaagaagtgatgtgtttgtgtgtgtgtgtgtgtgtgtgtgtgtgtgtgtgtatgatatatattaccatattgtgttacatatttattaattatatattattctattatatatctctcaaaagattataataatgataattatatttgggcagtgagatcatagatgtcttcaaatttttccttgtatccttcgtctgaattttctgcattatcctcactgacaatgcccaatttcagtaataagaaaactcacaccgaagaatgcaaaaatatctgaagccaaacctatgtagtccaaagctgtctgctttctagtttctatgctaagcccaacttgcacattcaaaacaccattcccgttacatgcatgcagtaatgtttcatcaaaattgcatctggagtcatgtccctggacactgggctgtcagggattaagatgggtgcctctaaattctgggggacgggctacctattgagccgtaggtagtgcctgcattttgttacccatggtgacagctgccaatgtgtgagtgaatgtgaaatgtcaagttctttggcaccattcctggaagaatctgtaatttactggcttcctcatgtcactgtctgaagtattgcctgggagacaggctatgacccaccctggatcttggcccagctttctttagggttctctgaaggccactttcccatgagggtcctttggtgggagcccttcccattcattttcctcttgcttcgaatttctcctggggaagggaatggggtctctggcaacttatttttttttcctgcttgtatttctgggtgaaatcccatggaggcacaaagtgtggagcgggggatgctgctcgccccatcttattttaaaccatgataaggtggcaggagccttcagcgatcaggaaggaagagacaaccggagagtggcaggagtgagcagaaatgactccaaaacggctttggtatttgctggaggcctcacagagaggatgcctgccagtttcgtttttattttttattttttaataccaattcagtcaacacaagctaggcagtgtgtggatcactttttttaattgctgcaaatgaaatgcataattaaatgccataaattaaaaactgacactggatgatctcactatgtctgatccaacaaaacaactcaccccaaaatgtggagaaagcagaagccttccttcactgatgtgcattctagcctctgttgaggacatgcactcctgcaaacctatagatccaggaaaggtcctcagacctaccacccctgaaaatagtgatgcactgacctcctgtgtgctctgtggccagtggtgtgcacgtaggaaaattgcatgctacagatattctcctcccaagcaaagattcaacctggtcagacaaaagtgactggtcaacttggtcaaacaacaagacaatgaaatgacagaagaatggaagatagacgtgggcatggaataagttgtgaatctaaagtctaggcaggcagacacccgagtctgaatccatgggattaataccaatttgtgcagttccattttgaataattggctaagccaaaagtgtccagactcatctcattattaaatagaacctgaagcaacatcagccctgttctctctcttaaacaccaaactcaaagttctatcagttgcatccctttctttgcatgctcaggcaacaccttagtcaacatggtcatgaccaagctcattggtttctggcttggttgatggaagaaagaaagcacggtgtctccctgagccctctggtatctacccacccctaacacaagtacactacaagtccatgccattcatggcactcaatgggcctgctgtcgtctgctcttttcaccttcctgcctctggtgtttctcctttccagtgtgccctccgccatgataccaccagaggtggctttctaaatgtgggttggcacattccaccttcttccttggaaatgcttattaactctcccctggctgtaggataaatccaaaacctgtcaatgtgcccttcgggactttcttgatccttcgacctagtaatagtcaagcctggaggctacagcaccttccagagacctgaccccagccaggagagagaatttgcctttgaacgggccatgttcctgggcctcgagtgacccccccgggcaaaggtataaatgcaggtgaagtgcccttccctggcactcttcacccatcacaatcttgttctttgaaggctcagctcccgttaacagaccttcagttgggccaagtcctggaactactacaccatgggagaatcaccctctgcagctggcttattacctggtgggactgaactccctgaggacagggatcatttttaactcattttttttcatcttgtcatcatccagcatacaaatccgggagactcaagaaatgtttgttgaatacacaaaactctgaaataatcatagtcgtacattgcttaatgacaaggatatatactttctgaagaatgtgttgttaggcaatttcatcattatgcaagcatcataaagtggacttacgcaaaccaagatggcaaagcctactccacacctaggctgtgcggtatagtctattgctcctaggctacaaatctgtacagcatgttactgtaccaagtactgcaggcaattgtaacacaatgggaagcatttgtgtacctaaacatatctaaacatagaaaacatacattaaaaatatggtatacaagataaaaaatggtacacttatatagggcacttcccactaatggagcttgcaggactggaagttgctctgggtgagtgagtgagtgagtggtgagtgaatgtgaaggcctaggacattactgtactgtactgtagactttataaacctgtacactcaggctacactaaatttatattttaaaatgtccttcaataataaatgaactttagcttactacaacttctttactttataaactttaaaatttttttaaccatctttttttctttctttcttctttctttctttctttctttctttctttctttctttctttctttctttctttctttctttctttctttccctactttcctttctttcctttcctttcctctttctttcttcctttctttctttctttctttctttctttctttctttctttctttctttccttctttccttccttccttccttccttccttcttttttttttgatagagtcttgctctgtcgcccaggctggagtgcagtggcacaatcttgactcaatgcaacatctgccttctaggttcaagcgattctcatgcctcagcctcctgagtagctgggattacaggcagacaccaccatgcccagctaatttttgtatttttagtagagatggggtttcacaatgttggccaggctggtctccaactcctgacctcaggtgatctgcccacctcaacctcctaaagtgctgggattacaggtaagagccattgtgcctggcctaactttctgactcttgtaataacacttagcttaagacacaaacacattgtacagctatacaaaaatattttctttctttatatccttaccctgtaagcttttttctatttttaactttttttaattttttattctttactttttaaacttttttgttaaaaacaaagatacaaacacacacattagcctaggcctacacagggtcaggatcatcagtatcactctcttccacctccgcatcctaccccactggaagatcttcaggggcaataacatgcatagagctgtcacctcttgcaatacctgtggtagcaatgtcttcttctggaatccttccggaaggacctgcctgaggttgttttacagttaacttttttttataagtagaaggagtacatcctaaaataacgatgacaattattgtatggtaaatctgaaaaccagtaacacagtcattcattatcattgtattatgtcctgcatataattatatgtgctacactttaacacgactggcagtgcagtaggtatattcacaccagcatggccacaaacacaagtgatgctttgctacgacttaaggatggctacgatgtcaccaggagacaggaatttttcagccccactatgatcttttgagaacactgtggtacatgctgtctatctttgaccgaaacattgctatgctatgcaaaacattgctaaagtatagaacataattatatgtgctagactttcatacaactggcagtgaagtaagcttgttcacaccagcatggccacaaatgcgagtgatgccttgtgctatgaccttaggatggctcctgttaccaggagataggaatttttcagccctattgtgatcttatgagaccatcgtagtacatgctttcagcactgaccaaaacattgctatgtggggcatcagcaactcagacaggaaaaagttataattcctgagagcagtaccaggtaactgaggccatattctgaaatcaaaaataccaggaggcctgggtatttgcctcccctctcttccctgctcacctggaccagacaggctgctgcaaaccctcagtcttcggatggacttgaagctgtcagtctgtggctctgtcaatcacgggcctttcgaaaagactcaaattcattaggaggggaaaaaagcctttaagaaaatgttgtcagaaagaatcaatcagtttaaacatttaaaagtaaaatgtgcgtcagttagtctccatgggaaggttttcatattgcagggcattccctcctggagccccgcattctgaagtttccttctgaggctcggctgctcttgaggtgagggcaggggaggaggcagcagcagcctgtgagctgggggtgctgaggctgagtgagaagtggccatgtcattctctagcactgcacatctcacatggatataaagagatgacatggtttcaggttctttatcagtcagggtagagcataattatttgatcttgttttctggctggcattggagtatcctattcattcctctttttatttatttattagagacaggatttccctctgttgcccaggctggagtgcagtggtgtgatcagatcacagctcactgcagccttgaactccctgaatcaagggatccttccacctcagcctcctgattagctgagactacaggtgtgtgccaccacacccatctaacattttttatgttctatagagaagagggtcttactaagttgcccaggctggtgtcaaacttctggcctcacgtgatactcctgcctcagcctcctactgttctgggattaaaggtgccactcactgtgtccagtctctattaattcttcttgaaaagagagaagaaaaagagaaagaaggaagggaagaagaaaggaagggagggagggaaggaagaaggaggggaacaaggcaaataaagcaggatgaaagagagggagggagggagggaggaagaaaagagggaggaagagaggggagaggggagcaaccttcatccatttgcacttgatgacgatataggctccccactttgtgctctctgagtggctctcccagctagttaccactggcttcatttttgtggtgcagaggtgttaaataacttgcttgagcacatgcggctagatggaaagcatactcagaatccactcttttaacacattttgttttgaaaatgcaaaaaggtagaaataaagacaagtaaaagtggaaatactctcttcagccatgaggtatctttccagatataatggggcacaacagaccacctttggaatagagtttggaggtggggctggggatgaagtggtgggagaaggattttttggagcgaagaagggggctgaggattccacctgacacccttctcactgggtcagcatccaaacagtccctgggatggctttcttgggtgaaaattagtttaaaaatccaattgcatacaattttaagtaaagggacaatttctcgaaacatcagagtaaaacccaaccaatagagtaaaaaaccaaaccaaaccaaaccaaaccaaaacaaaacaaaaacaaatcttcaagtagtttcttctattggtctcttggaaactcaaatcttcacttgtcagcaaaccaaacagctgcctacatggggagctttcaaaagctttagcaagtaccatgttctggtttccctctcccagtgaatttccttaaacacctccccagccaaccagaaattccaccactggatatgacggtggcctcgacttttacttttgttcacatgcaaacatcttagcaacaaacaacttacatgttttcggtcccgacgtgcttgtcaatgcaggaaagtagcctagaaaggagagtataaaacatgaaaaggaaagggaagcataagccaatgacatccaaggctgaaagagagtggaaagaaccaaaaactgatctgacatccctccatctctctttcttatataataaagtactttcttcatggctcaccacagagcaatccaacatggcacccaggtaagtcatcatcagggacagatacaaaggaaaataaaattgtccacagagaaatagaaaaggcctggacatgccctcctctccagcaggctgccaccattaagaactgcacccttcccttggcacagctggtgagtccaggggactccaggcctccgtggttactgtagcccctcttaatctcatgaggatgtgacacagggtcggcttgctttggaagtgaacgggggagaaaagggacagtcaaatatctgtgactgatatttaaatttaaaaccaatgctattttatttattcattcatttgatttctttaaaaaattaccataatagctagaaatcccattggctgtcttgtgtgtgcatgcacacgtgttctggcacacgcacacacacaggttacatttttagggtacccagttcttttctaagcatcccggaggctctgaattgaaaaggaacttaaagctatataaatattcttcaaggcctatataaagaatagggtccccgccaactagtcacttactcttcgcttgatcacttctaataatagggaactcactacttccgcatgcagccatgcttcctgtttagacagctgactgttagattttgacttaatataaagatgaactttctgtttctccacttactgaatgcttttggcattccaggcactgagctaagccttccacacatatcatctttgtcaattatatcaacagccctgtgagacagggatggttttacagagaaggaaactgaggctcagagagacaatttgctgaagatctcattgttagttagtggtcaggttggggtttggtcctaggtctcctggcttccaaattctcaggattgaatagtgggcttaagcttccatcctatcaatggtccggcatcatagagccaggctagttccccttcccatggaaagcccggtaggaggataagaaaaactctcccatcttctctttctgttcacctccacccctacccttccctggaacctcatctttcacagggtaaatagcccattccccaaaccagcaaccttttcctaagcatgttgtaagtgacctttgtgaatgtcactgtggagtaaacaaataacatttgtatattttccatggtggtcacttcctgcctatgctgtcctcaggagcaaatgacagaggtgcagtcctcaaacaatcaccacctccttagtgtctcgcagcctcttctcgttgggccgggagcagggcctgcagcatatacatttcatctagctgatacctcctctgtgatctctcctgccaactggactctgaggtccttaaggaaggctttattcatctttgttctggcaacacctggcagggctcaggtacacaactgaagctcaacacctctctgcaggaggaaggtatgaaaggagaaaggaagaaagggagggagaaaggggagacagagagaaggaggaaaggaagaggtaggaagaaagaaatggcggaagaaagagaggaaggaagaaaggaaataaagaaggactcaattaggggtaaaattacttaacttttatgaaaggaaagccattcatataaataaagtcacttcctcttataggaaaatacaaaaagatttgggatataatcattggctgattatagagataacctagtgatattctaccatttggaaaactactttttagttcttactggtcaagtagtaaatcggaagtatccaaatcacaatcatttgtttgttcttaaaaatctaaattaaggccgggcgcggtggctcatgcctgtaatcccagcactttgggaaactgaggcaggtgtatcacctgaggttaagggttcgagactagtctggccaacatggtgaaaccctgtctctacaaaaaatacaaaaaattagccgggcgttgtggcgggcacctgtaatcccagctactcgggaggctgaggcaggagaattgcttgaacctgggaggtggaggtttcagtgagccactgaagagatcatgccgctgcacaccagcctgggcaacaagagccaaactccatctcaaaaaaaaaaaaaaatctaaattaggtaaattagaaatttttcaaaaaatgaaaataagtgtttgaatctccaactgcttttgagaggttggcagttgtggccagtcatttcttcctggcaaaagctggctgaagttgagcggcacatgctggtatagaaggagctcctgaccctgggttcatgatggaccctgcccagacccccacactttgtgtaattcctgtctgtccagggagctgtctgcaatggtggcctctgtctttcatctgtgtgtgttattttcacactgagtgaaagtgaaacaagttcattcattcttgtccatggatccttgcaaatctccagctctgaaatcctttaattctaagtcttgttcttaaggtgcccaggaaccaccagcactggccagccacacagaaggcagtccctgcaaccttgcttagtgacggtgctgagccctccacttaccagctccatttatgaatgctagtatttaaggcctgagatcttattttcaaataaattgcagcacaccaaactgagttttgttttgggaatttgtgagattgtctcaagactagccccctaatgtggggccaaacagcaaggacagaaaaaacatcagggttccaccgtctcccagtccccccaaagccctggactatctgaatgtgacaaaactaacttgtattctcaaatgtccatcctacacatccccagcccctgtctcacctgtcagtctctctcagttagtttgcaaggaacacaaaattgtatatagagtctgaaagtgaatagactatgccttcatggcatggccttattggtgaaaccccaaggtcaagaggcaggagaacccacagcacctctgcaggcagggatgccttcctgaggctcagttttggagacaggcaggcgctttatggggcctgttagtgggcaccatatacatcagatgactcagtccgctgtgttcctcttgatgccgctgaactgcttgcaagacgatttctttgagcttccttcctcccttcgtcgagcagagggggtaagtcagggaacgcttttatgtggctgctgcgtttccaaatgttcctctatgattgacagctctgcattcagcttcccattatggcacctgcagataatgagatatcttgaaaccggaatttccagcgcctgagcctgccaggaatattatcatcagtgttctagaaagccattcccgctgcacacatgacctctacaaatttgaaatgtcaaaacacagccaggagctgaaaccaaggccactccagtccaagtggctattggctcttgaatatacaggaaggagtcctctatcttgggagaattatggattaccagaaaatagtgatcttttcattaacctatatgtatttagaatgtagataatgtctgtcttttatcattcgcatagcctgtgtgtggggggacctgagaaatgaaggcctgggcattccccagagaatccaggactctttgggggctaactcaggccatcaaatctcctcatcctcagtggcaatctggggcttaattttgtagacgttatagccacctagaccttgttgtgttatcaaagaggataaaggtagaggaaactcagtcctacctttggaattggaagtttaatcttctacttgttcattttcttctgtctctttcacttgggctacaagcttagagtcctcagcacaagggggttatgggctcacctgtctactcaactgagcttctggtctgtgccattcactatgttgtgtgcttaatatgaattagatattttaggagcttgctatatacagacggtggcacttggtgaaggattttgttatcaccctcaacagggagaagcagagggtcaggtgactgatggggggtagaaggaggaaaagggtatttggagagcctgctcttggagctgggctacaaggttgggtgggattttcttacaggcataaactgatgagagtgagggtcatggattgacaggttttacatgcagatggttgctcatgaacaaagtcctgtaggtctagaagtacatggcacatcttgggggcagcaagaggttgggagggcctggatcacagaggggctgcacacaatgggagacctggctaaagagggcaaacaggccctcccaacaaaggcccgagagccagcagggctgggccatttccccaaagtctgaagactcggagtctgtagaaatggctcttacaacctttatctctttcttcctttccatgttgttgataggccagtcttccctccctctccccagttctccatccacggcagagttgaccctatagctaggttctaagggcagacacagaagccacatgcggccaccttcaagagctcttcatcgttccatcagagcgactggttcaggatgaactatgacccaaattgggccactgagaatcagccttgagattttagctggtgtcttcatgagccaggtctgctatttccacagagatttctaggcaggcaaaatagaagcttggcactgctggtggtcatcttgcactgcctggagaaagatgagctatggatgtgccagtgtggaggaacgcagagcagagatgggaaaggtggagttctcctggtgtcattcagcacctgacttcagccatttctgaagccagcttccatccctggattgtaccctgggagatgatacatttttatttatgtattacttgaaacaagttttagttgaacttctgtctcttgaaaccacaaataatcatagtatgtgtaacagcacgcattggcatagcaagtagtcctgttctcaccacaatggctttggggataacgcattggtacctgattggatattgagatgaggtattgcacaaacagttgaaggctatgcatgcacatttttctagacacttcactacttttctactcacttggtctctctctaagacctcagaccctgctgacaggtgcaaagacatccactccattccctcagtgcagatcttctaggtgtccacaagagaagcccattaggaccccaaaactcagagctagcaaagcagaaaactcagaccagttactccaagtggagctacacactcaggagatctccgtggacaggttcagaatcccactgaagacccggtctagcccaggtcagcatgggcagactcaggagtgggagcctgctctgggtggaagcccaagtggtccagaggtgtcccctgcaggggggcctctagctaaactgggtgggacctcttcctccttcctcttggaggctttggctacatgggggagtgagcaatgggcctcctgctcctccgggaagcagatatggctgaggcctgccctcctccaatggggcctggacagcaggcttttctcagcacatgaagacaaattcagcccagagggtttctctcctggttaagctaaggatatgaagttggtcagggaggacgaaccacattcttaaaaggcatcctgaataaaatggctcaataaccacagaagattggaaaatcatattccagtgcctcagaacccccaccacacatgcacacatatatacacaggcacacatacatatatgcacacacatgcacacatacatacacacataggcgcaaacatagacatatatacacctatagacacatgttcacacatacacacatgcacacacatatatgcatgcatacacatgaacatatagacacacacatacacatgtagacataaacatagacatacagacacatatagacacatatgcatgtacacgtatacaaacacacatgcatacgtgcacaaagacacagtgcacacacagacacatacatagacacatctacacatatagacacacacaaatatacacatagacacatatacacatagacaaacacacatatagacacatatacacacatagaaacagacatacacactgagacacacatatacacacatacacacatagacacacatacattcatagacacacacttacacatatagacacatctatacacatacagacaccacaaatatacacatagacgctatccacacatagacatgtaaacatacacacatagacacacacaatacaaagatacacacatacacatactcacataaaaacacacatgcatacacaaaggcacagagacacacagacacacacatagacacacatacggacacatacacacagatacacaaacacacatatacacatgcacacaaacatacacagagacacgcacacacacacagccacacacagaaacacatatagacacaggcacataaaacacaagtacacacagatacacactaacaccaatatcacacacacacatacacacacactactttctaaagactcgaaggagtcctatcagggaaaatgcacacgacttgtctgtcaggccagctggccctaacaatggaggcgtgtgtccccactgaataattgaccttaccccaggatccccagaaagcttttttttttttttttttttttgtttttcttttcctcccaatagcatctgaggacaaagagacacttgcagtagcggaacaggcctctccgggtaaaattagaactgtctctagaaaggtgcacgcatgtgctccaacatacagcaaataatttattgtcaggtgcaattcccctgcttgaagatcgggtggctctctggccatccacgccagactggaaagcagtgtccctagtccccggatcctgtccagctgagcgtagacggcagtagccagggactggcagcacaggctgtgtgaccggggcagggctgggagagaaaatggccgccctgtcgccaggtccttctgtgtgtggccctgtcaggaaggagccggagctccggccggggctggctggctcccgctaagtactaacgccacggtggcggtgggggacaggagatgagagacagaacagggcagctgcaaatggaaatcaccctagggaaggttacaactagataaagttttcgacaataagattccagagactgctgacgggagcaaagctccgtattttagtctcagtacaaatttgcttcaatcttatacaactcccatgcagcattgcccacagctgcatgctgtaaacaacaaacaaatctatttccatcagccctgctgatgccaggagaaaagtgcctgagcagaagacatgcacagatgcaaaccctcacctgagcctggcgctgccctccatttggcctctctaacttaatatcgttgttacaaagctattggtctcctggtagctagctggctcaacgcagtgcctcttcttccagctaatctgacaactccgatccaagaagcatcaagggcccaattaagaagacacatcttatcaaggagcttattttgcataacagaatacaaatgacgaataaaaatttaatgtttaataacttagtacaaagagggctgttgatatagaatgcctggaatttttatggaggctgtcagacttgtgataaaactgttatataggaacacttggcaaaaaacagcgtagaatttttcagtaatggtgtgtgcatgatattgcattaattcttgatagggaactaactgtaagccagtttgagtttcagtgtaagatggtgtgtgtgtgtgcgtgcgtgtgtgtgtgtgcatgcgcgtgtgtgtgtcgtgctctatccagaatgctctgagggtgtggctggacatgcacccatgcctttatggaggagaatcaaagtgcattttattgaggactttgcagagaagttgctcagtcctgcataagacatctgggtgtgtcttatctagaacagaaatggcaggaaatgagtggggtcactttctgtagtaactatcctgacaccaagagttgggcaggattcttaagggttgcttgggagcattggaaattctccatgacctctgtatgagggtgagtgtgtgacacggaggaacagtgtgtgggagggtgcctcgctagtctctggtctccgaaatttgatccctggaagcagctaatagagatatgcacaaaaattcatgcctgagctggatacttatcgactccgcagagctttcctattgctttagccatgaggacatctttcaatgatgctttcattcaaatatttactgacaccctaaacttggctcagctctggaaggaaagccacagttcttccaggcccctctagaaagcgggtctgtggccacaggattgactcttgtctctgccacgcactacctgcaagatacttgaacaagttacccgacttctccaaacttccatttcttcaatgtaaatcgaattatgaatggtacctacctctctgacttaaagtgatcacccagccttggcatttagcacggagtcgggagcacaggaaactctggatgtatatcagccttctatcacgttatcgatgcatttcagagcaattgcatctcccaagctttggcccagaggagcattggtgtccacactctgaatggctttaggctgattggaaaaattcttgacattatggctgtgtctccacaaaattccaaatgtctgtcgagagaaattgagccttcatctctagtaatgctttatttttaaagtggccattaactagggctaaactcctgctgaattagagaggaaccctttcagatagatgtacatatcacatctatatgaatgcaagatgaatttcatactcatcctgtcctattgcattagtgttattacattgaatactaaatgaatttctaatgattggacactcagaggaaaatgtgacccttcacagtagtcgtcaaactctataggtggattggaaattgtccggtgggggcttatcctactggcaaaaagaacacacgacccaaaacacaaccttaaacattattgtgtgggctactggaaagcataatttacttgatgaggctaatattcaaatgcaaacttatattagaattaacactacaggaggggcttttacatggaggatttgttacagaaataaaatctatcggtaacactttcattgttccatcattatgatctcatttggtattcactgtaatggcaccgatcataatgaatttgtttgatattcatgtggttctcccacacattaacagagtttctgttataattcaccatccaataagcattagttaatgcagactttagaccaataaagatggtctatcccacccctagagttgcctggagctgtctaagagttcagggacattttgatattgaatgatcctcctgcttcctcctggttcccatgccatccctcaagctggagagggctttctgaatcccaaactggacataaacaagaatggtctccatttagtttttggagcccagaggagcagttggagctgcaccctttgatgccaccagttcaaccctcacagatgtggactgtagaattaccctcctttctccctgtctcactgggactccatgggggcccagctaaacaatgctcccagcaaaatgctactcatgccagagtatataagccagtccactctccaaaataacttcctacaaaaaatttcagggctgtgctttggcgtttggacaaatgtttactctgccttggatccctcagccagggagtgaagccagtttctcagcagctctgactcgttggcaatcaagtaccccaaccccagagaaaataaaatctgactgatactggcccagttacttcatcacttgtcagggcactgggtgagagctctctattaaactctctggtaattaaacttgtgaaatgtccctatgatgcttcttagtaatgggtttacctgagtgcactgtccaggagggacttgccttgccatgccactgggagggatggttccatccctaaccaccactctttctgtttcaattgcccaaatatttattacaaggaatggcaaaaccgcaattgcttttgcaccaaactaataatactcatccagtacttctagaaaacttgtgagccagcatcaattttcaagagcaaggtgctgcccacgattatcttgaaaataatgtctgatcagtttcttagtacttggagaactctgacctccaggctaagggcatgatgtgcaaatccacactccttaaatcttcagtgccttttgcaaagacacactctaaccccaggcctgaggtaagaggacagggaagcaggtcttctagtgcctttgtaagggatgccggtatggtgagcaagcatgtacacaatccaaagaggtggggcttcctgtcctcccagaaagaagtgaatcctcaggaggatttctcccctggctatctgagcgtctttggacaagttgcttgcccactggcaatcaaatgaattaaatggcccagtgatcctcaaaataaacttttccatctgtaaaatgaagataatataatagttgcaaagattaaggaacctaaggtatgtagaaatagcactcatccaagctctaacataaagtctggactcaaactgcactagaattcaagattattgcatcaaacagcacgttagcatcttagctggaaacagatgttcctgctccaggctgcccccacaagtcaggtttgctgggcctctttcattgtctctgcaatgtggagtttcttttgcttcagagttatcctcacggctgtgattctccagcatctgtagctagaaaggagcaatgcagaatcctgggaggtggatggaagctgcctccctctgcagtgttaggtagaagttccttggattgcttgggtaaatgcaatgatttccttctgccttagtcttttgttgttgctgttgtttttctctccaatgtagcaatgatttcccattttaaaatattaagccactaagctgtaagagaaacaaactcctttgggcatttttaacattacctcagcagaggaagaaatgtcacatggtcctataccgcactgtcctcaaagggaatgtatgcctggccccaaacatagcttcctccttagcaggacacaaacaaagcagctaaagatggaggttaaggccagtcgactgcttccaggtaagccgcccttgtagtccctgggatgaaatagggcaggcaccagaggccctgggctggtctgccctagttttgtgggttcctgtcaggtcctcagagttatttagcatagttttgggtgagatcagttcacatagagtgcagtataaataccatccccaatgtgccaagaagcagttcacgaggtgtgccctcaccaccagcccacaagtcacgctgatgagctccgcgtaacctcaccttgaattagtgaactgcgacttgaaaaccatccttcaagtgtgtacaatttttttcatttttttattttgaagagacacctacttgagagaattcctctctggaatttaagaaataatgaatgtggacctcaccagcccctggccttttcgtagttcataatgaaaacaaatgttcatttttcctttaaaactgtcttgagctaaatgatactgacgctttcaatttttaacatcataatcaataaaggctgcttatgcacactttgcaaaaccatcagtttagaagtttgaaaaaaaaatctgcatatggctgcagcttgctggctggaacgctctcgcactaaatcttctgagttaaagttttactggtgtgttatgagtaaaaatgccttgtcagccatctgccagtttttctcctaacatccatatttccaacccttgctaaacattgggagcatgcggccacaagaggccacctctacaattaaacagccaagcgcagcagcagaagcaagggcatgtcatgagagaactgtctagtattaattttaaaagtccataaagactagctccgacccgtccaggatgatagacgggctgtgaaatgtattagaaactgttaaccccaggagagtaagaagagggcagaaaagcaaaaagggagagaggaaaaaaaggaaagaaagaaggaacagaaacaatcacaaacaatgcgccagtgtcaaaagcttcaataagtgctaatcatggctgattaatcagtctctaattccactgatccaaaaaggttacagagtcaattgtgtaaaattagctccttctcatgtgtccctctgcatttcgagcctctgtctgttcatttgcatcttttgccaatgtttactaagaattcagttcattagctcttgagcataaagtcagaaattggaggggactctgcattttcttgctgagagtagtgcttaaaacaaatagcatcacttcctcaaacatttatagattaaactaaatggcattaattaccgtaaatctcctatttgtgaggagaaagaggggggaaagaaaaaaaatcctctttctccatacccacagtttcatggcaggattgttccattctcatctaatgtctcatacagttgggggcaaaatgtttaatcacagaattaacaggaagcgaatggcaagggaagctaacaaggcgtgctgcaaggaggctagctaactttttatagagccgtgttttgcaaagctcagaagcagaaggttgcttttgaaagcccttattaaaaagagatccctgccacatatgtagaagctatcttgggaaatacctgttttacccgtgtttgaaaatcttgaaacctgccaaagggaggtggaggagccagcatggggcctggctcaggaagtctgcccagggcctcacagaggaagctggggattgacatgggagagggggagctcctgcgtgttttccaaaagtgcatcttgtgtgtttcagaggagagaatgtgcaagtcaaacaagcggaatggtttgtagagcaagggggtaatcttgcaagaagccacacacctttctgggaaatgtgcagaattcttggtccttggaaaggacaagacgccacctgttcagacttcatttacaccaagggtgtcgcacctgctcctctttaggagacgtgggaatggagcaggagtaacaccccagagagtcgtgttggcctgggagggactagagccttccggagctccctgctgtgtgcacagccaagtatattttaaacaatgtgctggtgctgatcaaacccaggggggctgcttgcagaaggctggccacaggcattcactctggatctctgggtgctctcccctcctctagcttaagtatattcacatagtctggtccctatgcctctgcttctattttcctacatattttctgcctgaaatgcctctcatcctaccccctgccgacctcttctttccccaaatcttagcaaagcatcaacgatggaggaataggtattccaagtggaaacccttagacattggccccaccctcccagagctcacatggagcaagggaattctagatacataaggaagtaataacaatcagattacatgatgacagcatcacctcctccagggagcctcctctgatttcctcaggctgcattcctgtttctctatcctgtgtgtctcttagcaagggacttcctgttttccaattatggtttctgtttctatcttaccttctgagtgtgagcctctttaaaattttttttgttttgttttgttttgttttgtttttgagacaggatctctctgtcactcaggctggagtgccatggcaaaatcatggctaactgcaacttcaacttcctgggctcaaatgatcctcccaatgcagcctcctgggtagctggaactacaggcatgagccaccatgcctggataattgcttaaattttttgtagagacaggatgtcactatgttcgccaggctggtcttgaacacctgggctcaagtgatcctcccttctcagcctcccaaagtgctgagattacaggtgtgagccattatacccagtgatgagcctcttagggataggacaatatcccaagaccaagttcatccccagaccaagttcagcgctaggacaaaataggtgttcaatacacacttgttgaatgaatgtacctcagcaaccagaccctcattttgcaatgtgctgtacagacactggtcctttccttctagctgtaaaatgtcatgactcaggactgggcctctgacccctctggtcccaggaattaacaggtttgcagaaggtgtggggtatgtattaataagatgtgtagctattaatccagcgcaagatgagatgattaaagtgaaacccacagcaaggtccagatttggggaataatgtgatggaaagttatttattacctctatcttcctttatgtctgtgtatctgcccattgctaaatacaagcatcttgagggcaggactatcttgttttcttcctgaccctaaaatccaggacaagcctgacttgcagtagatacctacaaagtatttgcaacggaatcagtgggtaggcttggggcctaaagcacaaagcccctttcttatattacagcaaatcaaggatcagagtgtctaagcctcctggtgcttctgtgcccatgtaaacatacctgtatatccgaaggtgaaagtcatttatgtcaaagttatgcgtggaaatcccttaggatggtattttgttcgagacccacagtggcctcccagttgggtgagcaagccatttttccctcccgtgtagggtacaccgttgaatctcgggaggaatattagaagtactagcttgcctttatgatcctcgttgtatttttaaaaatatgtcttttattttgtaaaatgtaatgcaatgtagtgagacattcccatcatgggactgagaacaactgagggtgtaactccaaggtcacatcacccatcatcctcaccctgggtgaggtgaatgtcagcatccaaagtccctgcactgctaaagcagggtctcctatagtgtcagtaaatctcctctgactgcccagcactcacttactcagagaaaccacagaggctcaggtcagcattaaggactcaagtgggtggcttctgagcccagcctgctgtttctagaccctccttaggctcacaccaggtgggtgcccgggcagagctagggtgggctggcacccgagaaggaagggcgggaggctccttagagtgagctcctcggctcgcctctgcttcctgattcatcatgtttttttattagctctcttttctctgataaacctttgcagaagaggcgctcttggaaacagctggagcaagtcccttcagcaggtggagtttggcagacaggttcccagatccagccaccaaatcgctcaagctcccacttcaatgaggggaaaagagagctgcaacataaagcaggctctgctttcccacctccttgtttaactcacccaagaataaacgcaacaagctgagcgtggagaggcttctgctcttcaacaatgcagtgggtcccagacaccccgtttctaccaaggagattattgtatttattttattttattttattatttatttatttacttttggcaaaaattcttcttgagctatctcttactttctttttttcttttcttttctttcttttttttttttttttttttttgagacggagtcttgctccatcgcccaggctggtggagtgcaatggcgcaatctcagctcactgcagcctccacttcatgggttcgagtgattctcccgcctcagcctccctagtagctggaattacaggcacttgccaccttgtccagctaattttttattattagtagagacgggggtctcaccatgttggtcaggctggtctcgaactcctgatctcaggtgatctgcccacctcggcctcccaaagtgctgggattacaaccatgagccacagcgcccagccctctgtctttctttctttgctgtcttttttatgttttgtctattcaatgagggagtgcagagaaggctttgcttggagcagacacctctatgcattctcctttcttgcctgaactttctcccgctttctgcactcactctgtcctccttctcattggcttcaacctgcaatccaatgcaaaagaaaatgggaaaatcaagggctttcttttccattatttaatgtcttgtttttagatttttaaaattctgacctgaaatttgaaaagacattgatacagcaccagtcatattctgttttaaattctcatcagaatttgtactcatgtcggggcaaagctatgaggagatggccaaggagaagtgctcaatgcccccaaccccagcttttcttccccaagacaaagtttgggctccatttccttatttctttccatttgtgtttttgcttttacatgatgattgtgggaagtggctacaatcagtgacaaccagcaaggtaggatgctgctgcccaaagccacagctgacccagaaagacactcccagattattggcagcagcggtattttaagaatttatagagtggaggtaaaaagggctttctacactatgaagtgggcgagttggtctcactctgggcgggaaaatttatttcaatttgcatgccaattgtgatggattggtagtaatggcctggaatgctgaattcaggagggttcactggctatgcctgtgctgagcagaacagtggcctcccagggccagtgactttggccactgagctaatgggaaggaaggtccctacctattttccttctggggctagaatctccgagctcattttcaaatctaggcaaggcattccaaaatcaagaaacactccataagtccataccagatacagtaatcaacttatttagctttctctgagccatcgttttggcaaattgaatactctatggaaattggtttttttcatgggacttcactgcctccctccctcacccccttgcactattgctgtaaaggatgctgagatatcagagtcaagcattcagttgtttcagtttctttgatggtgattagcaaaatagaatatgtgtatccttcaaggggagatacaattccatgaatgacgatagttgcattttctttgacatctttgtagctgccatatccatttgcaccacaacctgtatacacatttaaaaaaagacaaaaggaaaaaggtaaacgatcatgagatgtatttcctgtaatatttaataatcacattgaaacactgacatgcattgcgctgcatttacaaacctctgtttcctttgaaaattacaccctagcatttaattcaccaaaataactcattttatacagcacaacaatgtagtaaaataactcatctcgaatatgtggatatgaatagatttaacacatctgcattgaacaaaatgaattaatctaaaagccgagaaactgctgttctctttcgagagttaccgattattttaccattcccttcagtttacttgtttgtttttgttaaattacttttggaattaggaaatgaggaaagcagaaacactagttaggtttttctctacttggaatggagaaacgggacataaataatcatttgcattataccttatttctttaaaaattatatttacaattgtgcagagaccaaggagaggcctctgttcactgtgggcttctgtttaatctttggaaaatactgtatttccattacaaccctctcccaaaagaagtctagatattaaaattattttttgaagctgactgtaaagtgctaaaaacaaatcagagttcaagtgcatttcagggctcccccctgggaggatattcacttgtagacgtggagcccgtctcccgaaagaggagatgcatatgtgttcactgcatctgaattctcgcacacggggctgtgggctccacagtgcagcattcccaaggctcagtggttatttctggccctggccgtctgggcaggcacaggcatcacgaggagaagagcccatctgtgctgatggtttgggatggagtgtggtgacccaaacccacagctggaaagataaacccaagcacactcttcatgtggggcacaggtgccacaatctgggtggctctgacagttcctgggtcctggagggcctctctgatgcaattaactttgagggcaaccggcaggatctactgggccccattcctactaactctacagcaaatgcagccagaaggtctcccttccatgagctgggacagaaatggagaccacctttgtgcggagggatataaaaaggcagagtccccaaatcttcagatgcagagccttcaggtcagagtttgcaaatggatcctatgtcccctttcttgcagaaaccacattgggatgtagcacccaccacttccagtttcaggctctgcaaaatggagacagtttgtgcagtcacttaagtgcagaatctttatcttcacgatttcttgcctcagacatatactctactatactactatagcttcccttgtaggaacttttatcagtactccggtctctctggagtctttccaaagccttcaacttagttttcatagggaaaaaaaaatctaatttttcacctcttatttgatcaatgtgcacaatttattaaattgcataatgacaattacaactaaagcaggtttgggaataaactcatctgattcctgggaaatattcagctcacccagtgcaccccccctcctaccccaaccttgagcactcaggacactatgggcctcatcatccagggcatcttctagaaggaatggtggctctggctacctctgagttggtcaagagagggctggttaggggagtttctaagatcgaccagatatgatctaggagatattcaggctatgggtaggcaaggtggggaccatgtgacgggctttcctactaaggagtttagagattctcctggcagtaataaggaactgcttatcgtttctgggagagaaggaagcaatttcatccaatttgccgtctggaaagctcactgggttgcagtagggaatggactggattattgtttcttagcctttctcccgcccttgtaatgggattttacacccatagctttcgtgaggtgtgtgcctttgccatctctcccagtagagtaggtggctctttgtctttggacttaggcatgtggctgctttggtcaatggatgttggggggacatgagggaaccacaggctttgcctgtgtctgggggacttggctgtcactctatcactcctgcagtctgccaggaaaggaacatgcccaaggtggtcacgttcccttcagcctgagccttggaatgagaggtaaaggagcagacctgaatctgacttgcagcctggagcaaagttgccgtatccgacccacaggcccagtgagaaatgcccgtttgctgtgagctttgtaacaaacaaccctcagccctcaatgaggatgtgggttgcaattgagccatattgcagatggctgattaatacagaactggacaagactgagtgggatgggaagcaggaaacccatcactctctctcacccagttgggtgacttcaggatagtccgcgtccctctccaggacccattttcttgttggcaaagtaaggaagtcatagtaggtgatctctacgggccttgccacctctcaggggccataacggagcagaagaggagatagagcatcaccttgccctggctggggtacagtttctacaggagggatgatttccgtcactttcaccaggaaagggtcttggtcttcacgtcgtttgcagtccacaggatgccaagacccatttggcagtacaaaaggacatcctgaaacagcacatcccaatgtccccaaagtcactgcaagtcattcccatcaccccgtcccgtcccccgggctccactcacacaaggtgaaatcttgcatgcatgtatcctaaattccttgccctagctcccttctctggtgctgggggcagagcattcctagagaaggtcttagggtctgtggggggctccttaccaggcaggagactttctgccaggagccaggcctgcagggagcagctttggggtgggattttcgaggaagagtgattatcagggcatcggtaataaggggggtgggaagagcatgagaagaacaatggagaggcctccccggtgcagtcactctaaggtatgtcaccttctccgatgccagggccactgtcagaaaggcaacttcatctaactaattagcagggtttgccactttacaaatctgccgcggctttcttggcacgaaacagccgcggaggcaaagagctgtaggaacccattaaaaatcacagggctgaaagaaaaggagggcaagggggaaatttgagataagaggtgggggaaggaaggaaatttccctgtaccaggccagctgccggctcccctctctctgtccacatgcaagcaggaagtggttaaagtgatgggaaggggaacccaccctcctcttgagctgggcctctgatctctgcatctggtttttcctcttgaagcactctctggttttaaagtggctttgaaggaagactctcctgtggactgcaacctgtcactgcaccctgtcatccatccagtaattaaaatctgactgatttactgactggtaccgaccatcatagctctggagttagctgatgttcatctttcccaaggctaaagttacttggtgaaaagagaccgcttgctcccaagctaagctgtcatacagctgcagtggagaccataaagatagctaacagagccctcaccagccatctttagtttattttattctaatatttatcacctcccagcaaatgaacataatacagacaagttagggagaggtgtgcaggctgatttgtgggtccggtgtggcaggccatctaaacactggacgggccacactgaagagcagggcatctccccgaagggctggccaacctacaaagacttgtgggttggggaagagtcttgagctctgaaaagtgaggctagctgtgtgcatgggaaagggtaaaggaatcagggtcccatccaggggtgctgagtttcctgagccacccagcagcctgtggggtgacctatcttctccatcctgtccttgcatagtcttgactttgctatcacagttccgggacgtggcccatcctggcccttcttgtgtaaggttacaccagagctcctgtgggaggcagcctctccccacatctccagagctgctagacctgggctctgcccccatgaactccctgccagccggctccttttctcctcttctctcaggatcacttattcattcattttgtgagcgtctgcatggggccaagttccacgctaagcacaggggtgaatttgtatagaacagaacaggcctgatccaggctttgtgggactcacagttcggtggaaagatggaagcattagacacataaaggcacaaagaagtgcatattaatagtggaggcaagggctctgaagaagcagagtgaggggaagagagacaagagtccacagacggagcaccatgcaaactgaggaaagagtgtggagctgctctctgggcagggcacagactagagagaggcaatggggtgcccggagagcaaattgcaaagagactttgcactcagggaccagcacatgcagggctgcagctgagagtgggtgcccccttcaattttcattctgggaagctcacccacctcagtctatcttggcacaaattggataattgtatgtctctctctctctccctctctctctctctctctctcactctctctctctttcttttggagacacagggtcttgctctgttgcccaggctggagtgcagcggtgcaatcatagctcactgcagccttgaactcctgggctcaagcgatcctcctacctcagcatcccaggtagctgagactacaagcatgcacaccaccacacccagctaatcaaaatatatatattaggtagagacaggggtctccctatctgggagttgcccagtctggtctcaaactcctggcctcaagtcatcttcctgtcccggtctcccaaagtgctgggattatagccgtgagcactgggcatggcccacttctcatttttgctgaagcaaagagggctccagtactctctgcaggtcactgcgtctcccagctgacagccatcagctcgcatgtcttataaatcacgaaaccacacagtgatgcactcatacaactccctgggctgtgggtattaattgtgcatgatgatgtttacagaacaaaccaaaaatccatataacattacatatatatatgtatcattttttaaacaaacatcattataacgttacatgtcatatatatgtatgtgtgcatgcatgtatatactttttaaaacaaacacaatggctgttttgtcaagaaaattaagtggggggatgtagggagaaacatggggagaacgtacaagagataaggagtttccggggtctttgttccccttgccctctctgcttggggaggacttctgtcctgctgtttctgggacaagcagtctttggaggatggaactggggttgggaataccttcagggcttggagttggatcagataaatccagatgagataaactaatatgagatattacagaccatctggaaggactaggaagggtcacagagcaagtccacagagagcagacaatgagaaggagcaggttttctgacccttcccggggctctcctcaccaccctccaaaactaagggttcatttctattgtgtttgcttcctgttgtccttaagtcagagcagtgattctaggtcctcgtgaaacccagaacattacgcctcctaagctagacatcaataggaaggacacctaaaaactggagaccacagtacttctccaccaccaaatatgcagccttcacagtcccaactacctccttacatgctggtgcaaatcgggcgttccactcaggtctgagggtgccaccagccacctgcacacctgcgcatgctcagtggagctcagtggagctcaccggagcagtcgtgtctgccagacaaaagctatggctcttgggaagagagggaagatagcgacacagatccagttactagcaggaagcccagtttgttctcccgattcagtcccaagcatcccaaaggacttcaacttctggggagcaaagggcctccttcacctggttagaaaacctcgagggaagaagaacagcgggtgagaagagtggaaggtggtgtttttattttgagtaaatcaattggctaatcagggtgggattttccatctgggagttgaaagggcaaaaggagaacagttaatttttcaaaacttcactttaaaatacaagccccctgtttgtgagctacatttgatgcagagtctaggcgggacatcaagaagtggcgtcagggccagaactagcatagtttaaaagaacagcaagtaaattaagacaattaggcattcttaatgcccagggattttttttgtgtgtgtgtgtacatttttcttccaaaagagcctgcttgcaagacagaatttcttcttattttctttctttcatttcttcttttttttgcattcacactctggatttttccttgtatttctcttggggaatgcatagtttggtcctgactagggtgggtaccaggctgtcgctggtagggagcctgtcctgtcctaaatggctctcaaatggagtggaagggggaagggggaaggggaggactttttaaaggtacaaattccaccaactcctggagaccccaggtagaggtcagtaaggttaagtgagataaaaaagtgaaagcatttctggaaattcttaggaagaaaggtgctagataaattctagctacatttatgactatttttatggcttggcttgtaacactgtgggtggtccctggacacggggctcattcattcagctcacaggaatcatgaggttgagatctgcaaacagatctggctctggaatggtggatgggatggggagatggctccagcagacacctcactaagggggcaggaggtcactgtaaaacaggaagatcagctgtccaatgatggaaggcacatttctcaaatgtttctgaccgttacccatctagactcaggcacacattcaccctcccattcccattcttctgtggtgagagatctggtgataacaaatggagaataacaaaatcagccagttgctagtaacacacataaactgtgtattatttactctatgagagatgaagataagcatatacacatttggttttattttataaaacaatgcctcataaagtaaacactagcccagcaattttattgcatttaccttgataatatgttgcaagccatttaaagagaacaaattcactgacagaccatcacccatgaagtatggctatacaagcacaacagtttggggataaagtataaattggttttagcattaggagcaaagatgattcatacggaaatcacaatgcaaacaggtcttcaacttaaataacaaattttaatttagaggtcgataatacttttagccaaaaatgtgttcctgtctacattgtagggttgaggaacaaactgcagcaaactggtaaggatgcaaagtttaatgtaatttgtaaattgtaaaagcaagatcggcagctttgaaatatcacgatctactcaagagaccagtcatagaatgaccttccagaaagtcctatactctgtatggggccaggtgcaccagaaactctgccctgctgccatccagacttggtagaagagttctccacatactctagtatattcttaatttttatttatgaattcttcattacattaacccaagaaccttcctaatggattactaataagtagctctaggtaacatgtgaatctaaaagtggttgtaattcacctgtaattcaccagcccaggacaggattcatcccctcatgtggatagtggtggccttagggcaaaagtaacaattaccgaaaagaaagtgtaaactaagggttataggagtttggaggaaagaggatacttttggctgggtggaagatggggagcaggggataacagggataatagcttaggggaagggccctccaggaaaacagacccccaggagcaaagtcttggggtgagaaatgaacaaggggagaatgagtgaccctgagtggctggagaggggtgtgtacaagaggaaatcatgggctggaggactggtcattatctaatggatgatgctctgtctatggaaatccagccaggcacagaggctcatgcctaaaacctcagcactctgggaggccaaggtgggaggatggcttgaggccaagagttcaagatcagcctggacaacatagccagacactgtctctacagaaaataaatgaataaataaatatagttagccagacatggtcatacatgcctgtggttttagctactcaggaggctgaggcaggagaatcacttgagctggggaggtcaggctgcagtgagccatgattgtaccactgcactccagcttgggcaacagagcaagaccttgtctcaaaaagaaaaaaaaaaaaagaagaagaaagaaagaaaagaaaaggaaaacacaaactagaaatccaactaagtggtatatttgcaacataaactcttctgattctgacaccaggaaccacgttcatgcagaaagctttgcttagttactgccgcaccccaagaataacctgggcacaactgcaagtggacatgcacagtccagagatacagtgaagatttagtttcccaaagtgatagactttcctgtccagaaaacctgcagcaagatcccagtataaggatcgatagggactatagcttaggaaaacctctttaaggaatataaggactttaaaatctcattaaaaggattacaccttaggaaaccccaccccctaactcagggcccaggggaacttcttggaaagagttttgtagaagcaattactttgggggcttcagctccttccagtcacacagcagattaggggtggacacagagttggaaaagagaaaaatcaaataaatgagtgggaattagagggttttttttctttcttttttttttttttttgacatggagtttcgctcttgttgccaaggctggagtgcaatggtgccatctcgactcactgcaacctccacctcccggttcaactgattctcctgcctcgggctcccaaatagctggggattacaggcatgtgccaccaggcccggataattttgtgtatttttagtagagatcgggtttcaccctattagcaaggatggtctcgatctcccgacctcaggtgatccccccgccttggcctcccaaaatgtagagctcttctttaaagtcttgttcaatatattgaaatttttcctgtatcaaaccaggaaccttggaataaagaactctgagtgaatccagtctctaccaagtactggctgcatacagttgggaaagatagcaacaccatcggtactttgttctctttcctacaaaatgggagggatggcaaccaccctatagggttccagagaaaagcaaagggactaaggggtgaggaggtcttcagtacactcaaagcctaatgcaaatgatgggtgtgctcatgcctatgtcagtacacctctcaacaaagagaaagaagaatactccagggccttttaagcacacactggatccttgtcctggacttagagaacaaggcagggtagaggtaagacctgaaaccacagtccccattatgagctcgcctcctaaggacatgctgttgcttccccagaatacacaaagacacagctgacttatgatgccttgatttatttttaaaatttatttctattttattaatttttattttattttgagataagttctgactctgttgcccaggctggagtgtagttgtgtgatcatggctcaatgtagcctctacctcttgggctcaagagatctttctacctcagccacatgacttgctgagaccacaggcatgaaccaccatggctgggtaattttaattttttttttaaattttcgtggagacagtctctaccaagtactggctgcatacattagggaaagataccagggtctggctatgttgctggtcttgaactcctggcctcaagcaatccttccacctcagcctcccaaagtcctgcaatgacaggcactggcctagttatttatgtatttatttattttttttttttaagagaaaggccacaacagaagggctgtgttttcaaccttattaaaaagcaggcaagggacatgaacagacacttttcaaaagaagacatacatgtggccagcaatcatatgaaaaaaaaaaaaaagctaagcatcactaatcattagagaattgcaaatcaaaaccacaatgagataccacctcacatcagtaagaatggctattattaaaaagtcaaaaataacagatgctggagaggctgtggggaaacaggaacatttacacactgttggtggggtgtaaattaattaaactattgtggaaagcactgttgtgattcctcaaagacctaaaaccaactatcatttgatccagcaatcccattgctgggtatataccccaaagaatataaatcattctgttataaagacacatgcacacaaatgtacactgcagcacttttcacgacagcaaagaaacggaatcaacctaagtgtcaatcaatggaagactggataaagaaaatatggtgcttatatgccgtggaatactatgtagccataaaagagaagatcacatcctttgcaggaatatggatggaactggaggccattatccttagctaagtaacacaggaacagaaaaccaaataccacatgttctcacttataagaagaagctaagtgatgagaacatatggacacatagaggggaacaacacacactgaagcctatcagaggatggagggtgggaggagggagaggatcagaaaaaataactagtgggtactagactgaataatctgggtgacggggccgggtgaggtggctcacacctgtaatcccagcactttgggaggccagggcaggcagatcacctgaggtcaggagttcatgaccagcctggccaaaacagtgagactccatctctactaaaaatacaaaaattagctggatgtggtggcacatgcctgtaatcccagctacttatgaggttgaggcaggagaattgcttgaacccgggagctagaggttgcagtgagccaagatggtgccactgcacttcagcctgggccacagagctagactctgtctctaaataaataaataaataaataaaataatctaggtgatggaataagatgtacaacaaacccccatgacacgatttacctatgtaacaaacctgcacttgtacccttgaacttaaaaaaaaaagttaaatagaaaataaataaataaaataaaatctaatggaaaattggataaaaaagaaagagcagtgttttcaacaacactcccccatgttatcacactgagcattgtttccaaattgattatgttctttaatcaaacaccacactagcattcttaaaagcactgagaacaaagcactaaagagttctctgccacagtttggcttttctttcaatgtctaatcaaatctcacatatttcctactgtctccccagaggagttctgggaacttttctttatattctcatcacataacccaccccaagagacaggaagggagaaaggaggatggaagaaacgaaaggagagaggaagggaggaaacaggataaagaaatgcagatgggagaaggttagaatgaaggagccagcatcactggactgaatgtccctgcatccctgatctgttcagtgggacacaggcagccagggaggcagcccaggagcctcagagaccgctggtagtggtgtcctcctcagcacttcttccctgcctcccgcacacctgagggtcaggcccttgcatctaattggacagctgggttggtgaacgtggcctgttctgccagccgcctcgtcggccacagtgacagctgtatcacttccctgatgtgagtgggcgctgagaagcgttgacacatgatcaacttccctctaatatccttcaaccaacctgacagttgtccggcaggggctagtcagctcgcctgccagccctcaccgaggcattgtgggacagcttcctaaggaatacagtcaggagagacttcaaatgaggcctttgttttcccctagtgtgctaactggggaattgattcaaatcctgagggtgatggctatgataggggctgctacatagggcctggaggaatgtaggtaacagcaaatgatagcatttgagagggccactccatcttgctctaagactagctgggtggtctcgtcgatgcaggatgtggttcagaggaagacttctatcagggatttgcagttccatagcaacacacgcttttttttttctattctcacatatctttccatcatgtagtttaaggtggaagaaacactctctcgtaccaggaaaagtttggaagcctcaaagttgtaagcagaaacgtctctgtctttcccgatgacagccacagtctgatggctctatcctgctgagcatcttgtcatcacccctgccaagtctcttagccagggggcccctctctctcgctcacccactagcaggaaggacaaggctaagtggggatccaggaagcatgggttcacttaaggctctgtcgctatgctaagtgaggccagagacatcttgcagcattgatgaagaatctggcatccagtgactgtcattctttcctctggttctgacattctccagatgtccatgagcaggagacgaggacagcagcaaactccagcttaacataagatggagaggctgttgggatttctgagggaccagagatcttttggctgcaactcagaggagggtaagaaaggagggctgttactaccgggatgttggggtggctcaaggaacacattcgccagaatgcagctgggcttcaagaacaacagaggccagacattccaacaccaccagtggcctctgtctcttattcctttttaactctgaatgtttgcttctcagccctactccctgttgttgccatttaatttttctttgtggttaaaacaaaacaagttgccagcaccccctaagcttcaataactacagtgcaacttaaaaagaaaataatggcctctttcactcagtttcacgtttaaggttctcaagaaagcacatgattggctcagcttgattgtgggtcctttgctgagccaataaactgtggccagggattgtgtcatgtggacaaacatggctgctccttgggaagcaggtagatggtgggtggtgagaggcgttcccagaagcacaaagtactgtgctgaggaagccatggctgacccatgctggatggctcctatgcccaaggaggctctataagaaagttcactgatgtcagatcaaacatggaatttgatctatgtaagatttggtttaaggttgtgattgtggttaaaatgtcattttgctcagcctgtgagacataattcagaaacattaccctccaaagaagccagtgagataactaaaaattcagctgacacccatgaagaaggagcagaaatgactctttggggatcattaagcaaacctgtctccagaccagctggggcaaactcagaaggcaagaagccaagttcattctccctgtggtccttgcctgttttccatcctgtcttctgttctccaagtgggcccatggagtcagctggcttccagccccatgagttcccgcaaattgagtagaagccagccctgtggtcaatggctgtggcaagaggcctatggaggcttccatgacatgctaaaaaaaaggctggcttagttagcaaacatggccctggggagaggacttgtggatttgggatctcaccctggctgctccagtgcagagaggaactcatggagaggccggcagaggaagtgagcagagctaatgttcaattacgtgcaggcaagctgtgatcaatgtgcagagaagaggccaggggaccaggctgggagagctgccaaccgcacctgtgaaggaatggtcaggaaccctcccaccctgggatgcattcctggcttttaccagttattcaggttctaaagaagtcacccttgagaactgtttgtgaccacttcaaaattacaagcttcccacaaaagtctgatttatgaacaatctgttagatatttgattcagaacaccttttcggaattaattaatctatctgaagggggggaaaaaggtgttttctttttaaacgtcaagtttctgtcgtggccattttctatgcagaagaaagaatcttttgattaaagtcagaacttctcccaattggggttacccagcacccaaggaagggcatccaatctaagctcttctgatgacgtacttgggcttggcatgtgcctaattaccagacacaggtcctttcatttctgtctgagttctggcacggctgaagaacattaaaacactgctcagagtgtgccttcatcctttctgtgatggggtggccaccaaccagcccgccagcacaggactttgggatggcacatggcagcttgcattcgtctccacgacacactgttgggcactgtcaggggatcagactggtagctgtgcaggaggctgcttgctccgataattaatttcctctccagccagccccttctaccagttgtactacccagaactctgccctagctttgtttgcctgcagctctccctaccatcccacctgccttctccagcctccccgctccaccctggcctatcctccccccaattccctggacgccagccttcagccctggcatgtctcctgtcagtcaccctctgaggcccaggcttctcttcactttcctgaccctacaccggcagacatttcctggtgacagctttgtgattcctctccacatctccaccgtgatgtcctgaaaacacggggctctaaagaggcctgcaggcagacagcaggaaccgagaatcaagcccaggccccttgtcattcagtccgattctgccggccactggcagcccctggtttgaagttggaggttacagtgactgctattcctctctcctcttctccctctctcctccacatccgcactacacagaacaggtctccttgtttatcagcttgaattgggaatgtacatggcacatgccttatctttattatacatgataacacattttccaagatagatgatccgctcttagtcacctcaatacgcacctgctacaaactcccaggctcagattcaataaacatttcctgggcactgagtgagttccttgattcagaggcagtgaccaccatgcggtgcttcagaacaaaggcaccagccacaaagacccaattcaaatctcagctttaccacttcctagccggatgaccttgggcaagtaacttcatctcttagtgtggtgcctggtctgtaaaacagcaataataccccctaggctttctgtaagtgtgaaatgagcaaattcacaaagcatttcaattagggcctggcccattgcaactgctgcctaagcagctattattatttccaataggtaccatgatatctgttttctcattattatgagaatcttgtaaattatgtactactgtctgcatttggtttataaagacaccgaggatggagaagttcagatattttgctcaaatgtgcagtgttaattagcatcaataccagggcttgaacctgggtctggggagaacctggccagctctctttactctggccatgaagtgctgggtactttgcaggtgcatatgtgcttcatcaatatctgtcaaatgttgtgtaatcgtctgttttcattcatattcacaactctgtggacatagagtggttagccattcaggaaagagtgagggtgttctgacctggggacatcaggcttggttcccgggcactggccttccctggaaagaccttctgggaaaactgaaggctagaaagaagcttccccattcaagaaggaaaatcctgcaataagtagccctggagcttgcattccttttaagaaggggtgaagaatcatacgaggcacagcacgcaggagtgtggggtgggaagatggaggtagcaatgcctcagctggccagcacaagaggcatttatgaaaatcaatccaggccaggcgtggtggcttaccctgtaatcccagcgctttgggaggccaaggtggggagatgtcttgaggccaggagttcaggaccagcctgggcaacatagcaagcctctgtctatacaaaaaataaaacaaaattagttgagtgtggtggtgcacacctgtggtcccagctactcaggaggctgaggcaggaggattgcttgaacccaggagttcaagtctgcagtgaaccgtgatcacaccattgcacttcagcctgggtgatagtgcaagaccctgtctcaacagcaacaacaaaaatcaatccacaaatacacattcgaaacttttcctcttctctcccgaaccatggccaccgactagctcaagcctctagcatctgtctagagtgtgctcacttccttacttgcttgcggcgtccgggcctctctgcccaagggcagccaggatgaattctagaaaatgcaaatccaggccaggcatggtggctcacacctgtaatcccagcactttgggaggccgaggcgggcagatcacgaggtcaggagatcgagaccagcctggccaacatggtgaaacctcgtctctactaaaaacacaaaaattagctgggtgtggtggcacatgcccataatcccagctactcaggaggctgaggcacgagaattgcttgaacctaggaggcagaggttgcagtgagctgagatcgcgccactgcactctagcctggtgacagagtgagattctgtctcaaaaaaaaaaaaaaaaaaaaaaggaaaagaaaagaaaatgcaaatccactcatgtcttgctccccagcccggccctccagtgtattcccattggctcatagtgaatcccaccgctttgctcagtctcacccagctctccatttcttgccccgtcatgctctcctggtctctgggctgcagctgtgggcttcctgctggacctgacacctgctccatgaccctctcttgcagcctttgcacctgctcttctctctgcctggagcaccccttatccccaaacccccaaggtggcccttttctccactgtgggttgcagagtacatagcacttgcttaaaaacatccctccggccacctcattctaaagagccttcaagccccgtctcactaccagattcctgcctcactggcattgtcgcatttgtatcaatagttgaaactgtctttagaaaaaaaactacttacatgagctccttgcaggccagaacttgggatttcttgtctatttctggcactcagcaccagaatgggtgaaggtgctccataaacacttgtggatgaatgaatgaaatttcaacccaggctttatgtgcccagtgcttgactgtgttttatggggaacagaaatacaattgtgtctcaaatcctgcccccagagagcttctggttctgagcagatatattcaccagggagtgaatacttcaggacagggagtcaaacatgtatgtcaagaagtcctagagggcagaatgagcggggagtggaattcctgggaatgtcttggggagtgggctgcagatgggtttaaagaatgactgggctgggcacagtggctcatgtctgtaatcccagcgctttgggagtctgaggcaggcagatacttgacatcaggagttcgagaccagcttgatgaagccccgtctttactaaataaataaataaataaataataaaaaataaaattacccaggcatggtgaaacatgcctatagtcccagctattcaggagactgaagcatgagaattgcttgagctcggaagttgcaatgagccaagatctcaccactgcactccagcctgggtgatagagccagactacttctcaaaaaaaaaaaagaatgatggcactgagagacaaagggaggaacaggttaggcttcccagcaggagaacgaccacagcaaaggcctgggtaggggtggcaggggccaaagagaggacatcgtagagattgcctttgaatagaggaggcagctgttccattgatgctgagtaaatgctttgcatatactttctagtttctcctgctgtttccctgagttagttccatcaacctgtgatggaatgcacaatatcttgatgtcattcttttttttttttttttttttttttttttagagtagggtcttgctctgtcacccaggctagagtgcagtggcaccatcattgcttactgcaggctcaacctcttgggctcaagtgatcctcccacctcaccctcccgagtagctgggactacaggtgcacaaccatgcccagctaatttgtgtatttttagtagatatggggtctcactgtgttgcccaggctggacctcatggcctcaagcaatcctcccattttggcttctcaaagtgctggcattacaggcataagccaccacaccaagctcctgattttcattcttatatctctcagagatttttagtgtcacttgccagagggcaccagggccagagtctaatgcccagtactcaatggtgaacatttttgctgtgccaagagagaaccactcgattagaggtggctactgcaggctttggaagttttctacggtgggaaccaacaatccgtgatccgccatggtccagtgcatgcagccttggcttctcttccctggacctgggaagcctgcagatgctggaagcagcccagctgtggcccctccactgttcttgccccttatgtgtgggtgtggaaagaactctcattcagagacatggtgattttgggatggagacgttgcttcctccaaccagactgcttccttcagtttccactgcctgggctcatgcatcagtaagttctcctactagaaagtttatttgcaaaaagccatggccatttgctcacaaagctgtgcccacttttgtctgtgtcttttgcccatttttttttttttttttttttgccaaatgtagggtttaaaataaaattcccgtgttacttccctgtaactgtcataacaaattccatgcacttggtggctagagacaacataaatgtgttctcccacaggtttgggaactggaagtcagaaatcaggagttcgagaccagcctggtgaagccccatctttaccaaaaaaaaaaaaaaaaagaaagaaagaaaataccaaaaatgagccaatgtctacagggcttcgctccctctagaggcttcaggggaggacacttccttgactcttccagctcctggtggcttccatgttccctggcttgtgactgcagagttccaacctctgcctccgtctttgccgggccttctcctcttctcccacggaggcagagaagcgtgtcctctcctcttcagtctcttacagggacacttgtcattggatttaggatccacctggatattccagaatggtctcatcttgagatccttaactttaaagcacctgcaaagactctttaacaaagaagttacatttgcaagttctggaacatgctcatatctttttggaggccactactaaaccccctacaattctctttacataatttcccaaaactgtttcccaaaaagttgccagcagtaaccaaattccagaagtgaaagcatgaccctggcccatggtgacaaacccgctttctaccaagttgatcaccacctaactgttgattctagcccttctaatctttagcctgtggtagcaagccaggtacaatttggcattaagatctaagaatggccaaagtctctcattgcacgcagtgctaccctgatgcagtggaaactacactaaacaagctccgtgggatccttgggccttctcccgtctccatgactcattggctgggagactttggaaaattttctctgcttctgtgaacttcagtctccctatctataaaatgaagactagattagaacaggggttgatatgctatagcttttttttttttttggagatggagtctcgctctgtcacccaggctagagtgcaaatagcacaatctcggctcactagaacctccacctcccgggttcaagtgattctcctgcctcagcctcctgagtagctgagattgcagatgcctgccaccacacccggctaatttttgtatttttaatagagatgggttttcaccatgttggccaggctggtcttgaactcctgacctcaggtgatccacctgcctcggcctcccaaagtgctgggattacaggcgtgagccactgtgcctggccagcctgcttttttaaataaagttttattggaacccagccttgtccatttatttacagatcgtgtatgggggctgtcatgctgcaagagcaaagcggttgcaacagagacagaatgactcagaaaatggagaatatttgctggctagccctttacagaaaaagcttgccaccccctagacaagtacagagctctgtaaagggcccttctagctgggttattttgtgttactatggaccagttcctcatttgagccctgcctaaaatctgatggtggcctgaggagctggctatggagagggagcaggactgaaaaaaaggctccatcagcctcacagtaccagcattgcccctccccggacatccttgtgtgcaccgtgcttccgcattgcctgcgctcccagaatttagctcccccagatcttccaccctgttctccccttggggcttgccccctgcaacgggcaggaaatgcagacagccaggggacttgtgggtccctttaaggccttgagacctggggaaatcccccagttctcagccacctaaggacaactcattctcccagtctaagggccgagtcattctcactttgcttctatcactgtccagattccagcaaaatacacccttccacagtcaaacctctacctccttcattctcctctcttatttgttaaacaaatcctgatctgcctttttaggctgctcttgaattttatggcaacatataataaacatctgactgcttttatttctatttaacttttatcttgaatgtctctgctgtttcaaaccaaatatttacagcatcacacagccgctgcaatttcattcctcaccaatactgtcactccctcctgcttgcactcaccagccccgtagagaggccgggaatgttggggcgaatggtctcttgtgcccccacagcagggcttccagactggatctctgagtcactggactcccgggagagcagatggctttcctggcagcctggccctcagctcggagtcaggccatctctggtgactgaagggctttctgtacttggtgtcttcacacatcggtactaggttgggtctggctgtgagaaagaccctcgcatgctccattaaggagcaaacctggggaattcgagcacctctgtcttctcaaaggcctctctttttctcagtaccctcaggtttggcccaaggcctcggagtgcagctccttggtccacctgtgcttgtccctgcttttctggcccaccaaaaagtgctcctgacagccctaaccacctactcttcaccaaggctctctggtcctgtgtggtccaaaaggccgactgcagatgctcttttgagtccagggccctaaagaaagcagtcctacctggtgggggatgacactctggacctggagtctgaagacctcgttttctgtctctgagcttcagttttctcatctatgaaatgggaatcataacacacgcttgatgtgactctcagggctgccctaaggatactgaaaaatggcgaatgacggcgtgctttgtacacagtgggtcgtccaaggggagccagagagtgcctctttctggcatgcctgagcctccggagctggagaagcctcctttggtctcctagactgccttttctcctcccatctgtctcaacctgcacaaatcctgccgggctctgcacattgctctgtgttgacggatccaccatattagccttgcctggccctttccttcgtccttagaagactcatgactccagctgagcttatgggtgaactctttcacagcagaaactgctttgcccttccttccccatgggccttgtacctggtcaagcctgcatctttcagctctctggtcatccagagggaagtctcacatgagtcttggtgagaatcttcaacttggccgtgcaagttttctgatactttcaatccagttcaagataagatacatacagcagtcacacaccctgaatctcagattctcagaggtaagataacctccccgacatgtcccacccatggggtagctctttccaaccccactagaaagtcattgttatgtagactcgatgttactgtactccccaaattcatatgctgaaaccctaactcactgtggtggtgtactagtctgttttcatgccactaataaggacatacccgagactgggtaatttataaagaaaacgagatataatgaactcacagttccatgtggctggggaggcctcacaatcatggtggaaggggaaaagcatgtctcacatggtggcaggcaagacagaatgagagccaaatgaaaggggtttccccttataaaaccgtcagatctcctgggacttcttcactaccatgaaaacagtatgggggaaaccacccccatgattcaattatctcccactgggcccctcccacaacacatgggaattatgggagctacaattcaagatgagatttgggtggggacacagcaaaaccatatcagatggtattagaaaatggggcctttgggagatgattaggtcatgagcatggagccctcattaatgggattagtgtccttagaagagaccctcagagcttttttgctgtcttcccaccaaatgaggatgtaacgagaaatggacagtatacaaaccggaaaatggccctcgccaggacctgaccatgctgccaccctggtcttggacttcagccttcagaactgtaagaaataagtttatggtactgcgttattgcacccccaatgaactaagacaacccacaccctggcttgtctcaggacaactctgaaggccactccatctctagagctccctacagctttggcttagaccttcttgagactacactgcagcccaactcctccctcagctcagcccgcctccttcctttccctacagtgttgatcacaagaacattcccgtctaaacattctgcacaataatctccatctcagagcctgcttcatggggatcccaacccatgtgacggtagccaactgtccttctttgtgcaggagtcctttattctgagagtacatcctagctacctttagggtgtgaaaatggtctttctgctatgaaatggtggcacaatcagatgcgtgtttgtgttatttttccctgtattttacttagcaccaggggccactggccacctgagggtggtcccctggtttcctttgatggtgtgccaggatgtcagatttaaaaatccaaggaccaccacagcttctcagtcggttctctgtctcaagagcaaccagatgaagtccacacacgtgatgccccgctgccttctcagataaactgtgggtcacatccaatttcagaatctagtggcaagtgcatcacatgccctctcaagaaggcatttccagtgggtgtctgctgtttctttttcacctctcctgtattcactctactttcttttggagagaatgctgcaatttttggggggccccactccttacctgctttcagtccctgtgtttgggaggaacgtgccttcctcttctcccgacagcagagtggtgatgtgggcgtgcaacccatcacagcatttcatcccctaaggcacagtgatcgggttcagagatacatatgtcattgggacaggtcaacgacagtgcaaccagggattttgttggcactgttgaaaataagaaacccatgccttcatctgttttgtgctgctataacagtatatgagggactgggtaatttataaagaacagaaatttatttctcacagttctggagactgggaagtccaagatcaaggcaccagcatctgctgagggtcatcttactgcatcctcacatggcagaagagcggaagagtgaacccactctgcaagccctttggataaaggccctaatcaatttgtgagggaggagccctcatggcctaatcacctcatgaagaccccacttctcaacactatcacattggaaacatcagaattttagagggaacacattcaaaccatagccaccctctgtccagtatgagtgctaactgtgagaacagggtaaggccagagctggccatgaaaccaaagcagagatcagaaccaagagacgaagaaagtgggagactgatctctgttaattttgctttagtatcaacctccagcgccataccagaagccatgcatgccattgtactttccacttatgtcagctgatacatttccttttcttcccttgagtcaattgacttaagtttttgtcacttgcatatgaaagagtcctaatggttatggaattggagaatgtacaagctaaaaggaacttggatttgctccaatattaaatatgaaatgagatcatctgtacacactgaaacttatagcaaagctgacaaccctaagtcacaattgagagccatcctttctggacaaggaggtccattcattactgcttaggccttcctgactcactgggtcacagtttctaccaccattggtctacatttctaagcccagcccttgataattgttagcctagaaaacagggtcagaaaacacagcccactggccaaatcagatctgccacgtgttttgagatggcctatgagctaagaatgtttttttttacattttacgatggttgagaggaaaaaaaaaaaaagaagttcaatattttatagcatgtaaaaattacattaaattcacatgtcagtgcccatacataaagttttattggaacacgaccatgctcatttgtttatgtatttatggctccaaacagcagagttgagcagttgtgatggagactgtacagcctacaaagtctaaaatatttactatttggctctttacaggaaaagtttactgactagtgctgaaagtctctggagatgtgaccttcacagtttggtatctagctttgagaccccgtatcaccaacaatgaaaagcacttcccttgaaataatttacatagttacccaagatttagacagcagacatctcaggatgtagaggatttttttcagattgtttccaggacctagctttgagccaaacatacagtattcctgcaataagtctttgctgtgtaaaaacaaaaatcgaatgttaaattaggccactgacccttttaagcccaaagcataaataaatacagaaaatgtgaatttgccattattattatttttatttttttgagacaaaggctcactctgtcgcctaggatggagtgcagtgacgtaattttggttcatcgcaacctccacctcctgggttcaagcgattctcttgcctcagcctcctgagtagctgggactacaggcacatgccaccacaccggccatatatacataatattatatattattatatatactatagaatatataattatatatatagtataatatataataatatataatattaataatatattatatattataaacaaatatatatttaaatataaatttatatatgttatatatatataaatatatatatttagtagagatgggggtttccccatgttggccaggctggtctcaaactcttgacctcaggtgatccacctgccttagcctcccaaagtgctgggattacaagtgtgagccacttcgcccagctgatttttaaagaagatctatccaggtcttcttggagcagaattatgtaggcatccaggaatgcgagttgtgctgccaagtgacatttctcttcatgttttccctccctggcagagtcgccacttgatttaggatctgacaccatgggtagatattggaattccagtcttagcctgcaagtcacacaatgtctttgagcttcagcttccaagcctgcaagatggggcgataagagtttacctcctgggagttaagaggattaaataagttaacagttaagtaaaagtactctgaaatgttagcttttattttcatccttccctccttgtgtaagaaaataatgtaaatagcctttattgctcttagtttttcttgtaaaagctgtgggaaggtgaaataacctcattgaaatagagccattcataagtagggtagatcattaaccgctatgagatagatgattatattccatcaggttccaagccgacagcacccattttacagtttggaactgtgaagtatttgtactgtgtgatccacagctcttaaactttccaagacttagtcagtccttaggttccagacaaactttcatcccacctacacccccaacctactctcatcagggttcccaatgactgccatattgccaaatctaatgatcacttctctgcctgtatcttactccgtctctcaacagtatttgaaagaattgatgatgccctccttaaagctcattctcatgtggcttagaggacagacctagcctcctacaccactggtcaatcctgaacttcctttgctgcttcttcctttttctcctaccaaccttttatttttgttttaatttaatttacttttttttttttaagaggcagggtctcactctgtcacccaggctgaagtgcagtggggtgatcacggctcgctgcagcctcgaactcctgggctcaagcaatcatattgcctcatcctcctgagtagctgggactatagcaacataccaccatgtttgactgtttttttaatttttattttagtggagatggggtcttgctatgttgcctatgttggtctcaagcttctggcctcaagtgatcctcctgcctcagcctcccaaagtcctaggattatagtatggacaactgaacctagcctcttcccaacctcttaatactacagggccacagggcactcttgtcttttcttcttctatatgcatattctaagtcacctcatatcactccataatgttcatgtactggctacttgcaaatttcctgcccaacttcaagctttcttctaaatatcagatcctgatgaccgactacctctttggacatctcttaggcatctgagccttgccatatataaaacctaactcttgttttcttttctcaaacctgatctttcctcagtcttccccatcttagcaaatgatccttgatgtgggcttaggggaaaaagaagaaccaaggatgatcaaagcttttagcctgagcaacctagaatgttcacatgtgatgctcttttcctaggccctgtcattaccccccattagatgaaggtgcaaatgtggatatgcatacacagaggaacatagactgtatatagatttgttattatccctccatctcccctacaaggaagtgaactccctgagagcaggacatttatgtcaggtcctgagaaaccacagtgaacaaaatggactggcacatagtaagagctcctcaaatatgccttgaatgactccctgaccttgtagaacaaaaatgcttcctgggtctacagaatgagaataggccacaagagaagcgggaatgaaacttggaaactcaagcatgagtgcatttttaagacgagagtgcatttttaagacacatctctgggctgaggcaacgcatttacacacatgtactgtttttactgaattctgaaccagagagctagatggatagatgatagataattaaattggttccaatgacagagagctaaatggatgtttgtttttatcatgccaaatgatcatgcttattttctgaaattttcacttcacaactgcttgttttggtgtcaggtagatacatttaagttatcaaaacttgcctgggaggagtgagaaaagagtgtgcttcttgtctctgctatcagcaaatataagcccaccaggtgacaagtccctgccaagttccaggacagcatggggagctgtgtatgatgcactcatggagtctaaaatcaggtgggcatccaggttggaaagaaagaagtagaactgtctttattcaacagatgataagatcactgatatagtaaatctgatgaaatcaacaaaaagctaatagaactaataggtaaattttgcaagaatgcagaacacaagactgacataaaaaaagaattgcatttctatatattagcaatgaacaatcaaaactcattattttaaacatatcttccacaatagcatcaaaaacataaaatacttaggagtaaatctgacaaaagatgtgaaagacatgcacacggacaacaaaatattgtgagatacgtgaaaggagccctgaataaatggaaatatacagaccttgttcacaggttgaaaaactcaatgttaataagatgtaaattctcccaagttgatttaatcctatctcaatcaaaatcttagcatgctatgtgtagaaattgaaagctgattctgaaattcttatagaaatacgaaagacctggaatagccaaaacaactccaaaaaagaaatgaaagctggaaagtggatcttacctgattttaataatgattataaagctacagtaatccaaacaacatgatattgtcataaaggtaaacaaatagatgaacagaacagaatagagagttcagaaataaagctatgcacatatagacaactaacttttacaaagcaccaaaagcaatgcactgaaggaagaatagttttttcaacaaattaagttggaacaattcatttgtattcaactgtatacaattgtatattcatatacaaaaaaatacatttgaatccatacctcatatcagatgccaaattaatgtaaaatgcaaaactataacatttccaaaacacatagaagaaaaactttgtccttagattaagcctaaaggtctttcatacaacagcaaagcacaatccacagagcaaactgatgacttagagctcttagaaatttttgtttttcaaaacatgcactgttaagagaatgaaaagacaagccacaggttaatagaaaatttctgcaagacatgtatctgataaaagacttgtattcaaaatgtataaacaattttcaaaactttacaataaaaaaacaaacaacccattaaaaatagacaaaatatttgaacagacatttcactagagaggacacatagatggccaataggcacatgaaaagatgctcaacatcattagtcattagagacatgcacagcaaagccaggagatactacttcacacccatcagaatgactaaaataaacaaagactgagcatacccaagctgtggagaaaccggaactctcatacactcatggcagaaatgtaaaatattcacccacttggcaaaacagcttggcagtttcttaagaaattaagcatacctctgccatatgatccagctgttccacctgtaggcattatcagccaagaggaaatacaagtccatgcaaagatgtatacatgaacgtgcatggcagcttcatctataacagccccatattggaagcaattcaaatgtccaccaacagatgaatgaataaacaaattacagtaaatctgtacaatggaatgctactcagaaataaagaagaatgaactattgaaatatgcaacaacatgaatgactcttaaaataattatgctgaatgaaagaagctataccaaaggaaggacatactgtatattctgtttatataaaattctagaaaattcacacgaatctagtgataggatcattggttgcctggggatgagggattggggaggactgggagggagggattatgaaggggcatgaggaaacttctggaggtaacgatatgtttatttattgattgtggtggtttcacggatgcatatgtcaaaacttatcaaatcatatatcttaaatatgtatagttattgtaagccaattgtaacttaataaatttgcacttttaaaaaatccaagccagacatggtggtctgcctgtagttacagctactcaggaggctgaggcagaatgattgcttgagctcaggagataaggctgcagtgagcttggattgcaccaccacactcaagcctgagcaacagagcaagatcctgactctaaaaaagaaaaaaagtcttatgggaaaaaaaatcaatttcctggtaaagaatgccaactgctgggaagaaaacaagatctggagcaaggtgagcgtttagcagtggatgctgcgtagacctcaggtgatgcccaaggaaagtcaggcgatatttgaatagaactgaaaagtgtttactgtgtgaaaagctggggaagaggggaggaggtgagaaagaaagagaagggtgaagacctttcctgaaggagggagcagcttgtaggaaggctttgaggtcaggtggagtgtgttcctatcaggacttcagcacagaaggtacacagtgatgtgtatcaacttgattgggctaagtgatgcccacatagctgataacatattacttctgggtgtgtctgtgagggtgtttctaaagagactggcatttgaaccaataggctaagttaagtagatttgcattgaccaatgtgagctgtcaccatccaatccattgagggtcagaatagaacaaaaaggtggaggacgggtggattctctcccttctccagctgggacgtccatcgtcttctcctgctttgtacatctgatgtactagcttcccctgatgcttgcacatcagagctcctggttctcaggccttctggtttcaggacttacagtatcagctctcctggttctcaggcctttggacttggactgaattacactggctttctgggacctccagcttgcagacagcaggtggtgggacttcttggcctccagaatcatgtgagctgattcccataataaatcccctcttaatctatctgtctgtctgtctgtctatctatctatctatctatctacctatctatctatctattatctatctatctttatttatttctatttacctgtctgtctatctgtgaataccattccttctgtttctccaaagagccctgaccagtatagaagctgtgatggataacacttaactcactttactcaacttttttttttcttttcaaaaaagagagctttgggagataaatggttcaaattgttcacgctccaaacctgcaggtttttccaccatcagaaggatgaccataaactcacagttctggactcccttaggccaccaaactccccctgacttgagcaggcttgtcctccagcctgaacaaccccggggcccagtcacatctgctgagtggctgctctgtggaggcagcatgactggcccgatgggtacagacacagccactggcacaaggcccaccttgctctgctctgttcagtggcctcagaacactgcttaagctctctggacctcagggtcctacctgtagacagttcctttgggagaagaccatgacagcaggtctttgggaaagataaaattgtgtgtaactgcaaagggtgttcaccaaaggactttgtctccaggtgtggccaaccgctgtagagactctgggaccccacccagagtcccttgccagctagtgtgtgcacccatgagggtaggctgctaaaatctcactcctgcaccctcctctggaggactgccctcctccttacttacaaatgctgggatgatatgccctccctaaggaggggtccccatccaatgactaactagtggagagtggcaatggtcagaccacttgccttaaggaaggatggctctgtggtgtcattcaggtaccagaactccctgtggaatcagctgaggccagactccagctaggtccacagcttggcctggcttctttcccacccctcctttgcttcctgaacaacctcacattctccctgcgagcacccccttgatcaatcaaggcaccagcgttctagacactctgattctggagaaccctaacagagacttctgagacctcaacactctgagatttttttcttttttcttttttttttttcaaacagggtctcactctgtctcaggctagagtgcagtggtacagtcatggcactgtagcatcaaactcctggacttaagtaatttgcccacctcagactcccaaagcactaagattacaggcgtgagccaccgtgctggccccactcagagattattaacggcaggtgtaacatctttgccataagccatcccacctctgccccacatggagggtcccactgtctcccttcccagacctgccttggaacactgaggagcctagggcccaggacctgactcactcctggatgttttgttcacactcttttcaaaaaacacattctcaatagctttaatttaatcaaaacattcttgactaagatcattaaagcctctgagagaggcatttaattctaaattcaccatatccacggcatagcagttgagtaactgaaaaatcaactttatgtcataatagtttgttagaacgtttgtttactcttcatctgagacatgctaattaaaacaagaggccttcacaagcaatccagttagcaaacaggattggttaatagataaggaatggttgttaattacagggaagcccctccctgcccacatggattgggttgttcaatggggtccacggaatgcaacctttggttcatctcttccctcatcgaagacacttaggaacatctctgagaaacacttaccttggtcgggtctcgcctgtcaccagatctttctgaattcatcttgaagggaagtgattcaggacccttgtggatttctgtttccctagggcggagctattcccactctcccaccaccttgcctgttagcatgtggtcctaactcctgctgcactggctcctcacgcaggataaggagctgttgcagaaagtcccctgctaacaactggccctctgactgctgtaggagacctggccagccctactaccttcccacagacacacccccacatgttccagaagccagtcaatgggggcagggggcatgctccttactatgagttcaggaacatctccaaacatagacaccaaggggcccaggatgcatttgttaagtttcaaagtatcaaaccccttacccttccaacacggtttccactctgtctggcctttttctgcctttctgcataattgcactttcacggacaatttttcatctgcttccctccctcacaagtctaagaccaatcacccaatatcctgctttagtcctgcccagcaacctctccttctggcatattcccctcccttcagagccctgggtattcatgcacatccggccctcagccaggacatatactccctgctctccccagcccccaactcaggaacagggctcctaaccttcccgtagactccaagatgttagaatgaaaagacatcttacagacctcattttaaagtaaagaaactgaggcagagaggcagtgatggaggcgttgtcatatttctggttggaaggcgcaacccaaggccacgttgctatttttaatgtctaatccacattacaatgtacataagtcatgagctgattccaaccgtgttactcatttttgtcatccctgtgttgagttagttctcttatgcagagtttcagccttccagaagctaaaagactaatacagggagctgtcatgacaacgacaccatggtagcacttaatgaaaacttgagttatggaaatataaaatactgaaataaaaatattaataaagcctcgcttttatgtggaatttggaaatatgtgaacagcaaaaattttatcactatgaacacattagtcttgaattaggtgcattttgtattgaggacttgaagaaggtctcctcattgtgatgactgaggtggacggggactccaaaggctctttaagctttgaagagcacagatggcatcatttgtgcctgcagtctcccgcaggcctggcacaaagaataggtgtctggtaggtgttggacaaggaaggggtaaaggaatggatgttcctactctgaggccctgcagcctccagtcccagagctcgctttgggcagagccctgcagcagagaactcctgtaactgtggggacctcttctggaggggctggcgtctcaagggtgattggcttcctggcagcaaacacaggctccatgctggagtgtttgaaggtctacgtatcaaaagggaggaaatgattaatcatatgtagccagcctgctgagaggagggctaggaaaaccaggatgggaatcagaaagaagcgtcctcctggccaaggacgtttcctgccttcttacctccattagaggcactttcttctccgacctcagtcttttctgtgcaggaaatcctggcctttttagctgctgtaagcctttgcttgctactggtctcaggaagctgtcctggactgatgtctgaaggcaactgccacttcattctcactagtactttctgagcgctgaatacatctcaggctctgccctaagcacttctttaattctcccgataaccacatgagggaagtgccattatttctttttcccaagtgaggaaactgaggttctgagaggctaagggttggaactcacagctcttctctaagcaatggagatgactttggaaaccatttgactacaaaccatttacaccgtcttcccctcccagcctccgcccaggttgccagcctcacattgttgtggttcccctagtttcctcaaaagtcaggcagcccagcctgggggagatctcaggaaactccaagatcagcttctacatgactggaggccacagctgctaccaccactcaagcctggcagcaccaacgccaggccttggtgatggatgtgtgggccctggccatctgcctggcaccaaccagactcccaaatgccccagggattcagagtgtgccaggaatcccccaggccatgcctgtgctagtttctgcacctttgctcacttgatctcctctgcctggagcttctctttccttctctagcccaatccaaccccttttccatggtcggatccaatccccacatccccaactcttgggagtcctgctggcttcttccttcctcatgttccctgttggggtttggtgactcacataaatgttgtaaatgtgcatgatataaataaggaaaacagacctgtaataatcctaccggaactatgagggtcaatggtataggaggtccagactttacaagaactctcccattttgacgtaaattaatttcaacttataaaacactgtctatataaaagaaagtccatctttgggttaaatctgagctatgaaccaccagtttgcaactgtgtccaagagtatgtgtggtgtgtatcatcagagccagtattcaaatctgaatggcccagcgtgagtccctcaacttcctaatatgagtgactcgatttccccacaaggaaactcccgcctcctttccaaagatgaggaagttatgttgatcacattttccttgatcctctcactatcaggaacctccaaaccaaaactgagctaggtcacagaaattattttacccttcattttctcttttgttcttctatttttatgttttgtgctttcattatatttctgtggcaaactattggagaaatttcatgaaagatgtagggaagaattaaacacatgaattaagtaggtttcagggggatgtctccaaaccctaggaggtcaggaaacatttcctttcctgtcttaaccctgacctttttccaggtccagctgggcacgtgtattgctcagggttcattgtttgcaagttgcagaaagcaactcgggctggcattatcacagggggatttttttagaagaagatggagtaagtcagaaaatgtaaagcaaaaacaaaagaagaaaaagaaccagtcggggaaggatctgaaagcagagccatggcgggctgcattggactctgactccagttgcaacctgggattgatggattccaactccgctgcctgctgatcgggactcaaattcagagaagttggtattgcttggataacatttcctctctttatcagcctcgccaagacccttagaaaaagggagcctgaattccccggaggaaaatctgggcgaaatatagggaaagaatggatgtactaaatggatctcgttgaagtgtattgaactgagccaggcctggtagcgtaggagaatctagtgtgggaacgttcattcaattcatttctctatttcttgtggatccaatgggagccatcatggcaggatgaatcatgaccccagaaaggagccttcacttaggaagttggataaagaagaaagtggggtttcccagagcttccttcatgggtctgaaatggagcaggcctacctgagcctcagagtggctgccaccccctgcaaagcaaccataaatgccaccttctgtcctgtcctggactatacagttctgggcatgctcagtatcttgccacagggctcagcccacgcgacagtgctccagcatactcttctcatcccctgggttgccaacgtttaaggactccacaggtattgaggtgtaggggttaagaactcacatcgagagctgtcaagcccaggatctgagctctgtcttctccagttgtcaggttttaaaccggtctgattgcttcttttaaaacttccaatttctcatctgtgaaatgtggataataatgctgacctcataaaggtcgtcaggaggatatgaagatgttgaataagattatcttattccacaagtggctcctaagcaactactccatgctaccctcttaccaacctcgggggttgcagcaggaaaaggacagacaacatgctgccttcctggagagagacggcaatcacacaaataaatgcacatattatttcaaataatagtaagtacagtgaggaaaagtcaatagggcattgcagagatggagacccatcttcagcaaggagggactcgctgcccaactgcagggaaagtggttagctgcagagcagagctgccttgacaagggtctcatccttcctggggcagcctccatctgagaactaagtaaggtgcctgtaaacgtctggccattttggctcacggcgggatacgctgatgagtgattcttactcccaagccacccacgtcagttgcatttcttcctctgcacaatgtttctaccctcttccctacacaggggttgatccctctgaaacatcttgcaaccaaaactccatcttggcgtctgcttccttctgaagaactcaacctgggacacagtaagaggacagatcacctacctgtgaggacccctgtgattcaggtgggtggtcagggaaaaactctgcagaggtagcatgtaagcagaacccagaagcaagggcaggagcaacaagaccctgtgggggagactggtgcacagaggagccaagaaatactgcaaagatcgtggagaaggagacaggcaaggcccgtgtggtctggtgggagtagtaggagatgaggtcagaaaaggaagaggtgatcatatgatgctgtgaggtcataaaaattgctgctggcttttactagaagtgaaatgggaagtcacatgaattttgagctagcaagtgatgtcttatgtttcaaatggtgaattctggctgctgggtggacaatggcgtgagaggagaggagaagcagagtagtagtgtagaagggtgttttggtggtctagggcaagagatgaccacagttacctgttatatggcaatcgtagcagctgtggttgtaatatagtagtattgtggtaatactaatagtagttgtcactgtagtcgtggttgctaggtcaagagcagggagttttcttcaccccacagcactgggcttgccatgcagtatttgcaagcagctcctctgttcacggtccatctgcataaggcctcccatggtgcagtgagtgtgtgaggccagacctttagagatcacagcctcaagttttgtttgtctcattctggctatgcgagaacatgctgcacccaaatatgcaatttgcaaattctggcctaggtttgctgctgttcatttcattttccagaaagtttttacatccctttcagctgctgtatggttttcctgtgtggaggactggtcagagtatgttttcttccattcagcggctgtaaatcccaccctggatgtggcctggggaggctggacctctgcctctctgcacctcctctttggaccattccctttcccttggatttctctttggtcacaggaggtacgataggtcgctggccttctgcaaccccactcaggagagggatcctgaggccccggcttcagagaaaattccataatcaactagactgagtgatgtgtttaggaggccaaggctgatactaactataattcacattccccgggcactctgctccgtaataaagcctggatgtcagatagcccggccaagagctaacatacctgtttgaactagtcttgtgccaatagaaacacgtcagagaagaaaaacatttagccaactgtctgatgcaaatgggttcttttcagccaaatgaagaaggattgcctagacaggggcatatgggtatgttaaatgttaatacataataaagcatcacacctctttcctttggtgttcacaaggtaacgtcccataaataaatagagtgacgagcttttagaccctccctgagccacccaaagccagaaggaaactgggtgggccccttctccatcatgctaccacacggggtacccactccaggatgtttatgcacccggtgtcagaatataaaaatgtttagccctttccgtgtggaattaagaggtatgaatttgtaagtgactctgtttaatcaaaacctccattgaaacaccatttagcccaaaccctatcagtgaatttcaaaatacagattttgctggtaaaatagccccgtgttgccgtttcctcgtcaaatatgtatttagccccccgagaatcctttttactaagccggcagctccagcatgcacaatggtttaatcgtatattgttctctgagtaccaaccctttacaaatcatatgacataaaaagaaaaataagtaacattgtaaagacagtaatgagaactgttgagctaaagtgcctcttaaagaaatcctaataaattccagaatttctagtcttctggcaagctttccatttagaacaaaatcaatgatcaatggctgcaacgagccagcattaggcttgcatgcctctggagcagggaaaactcatagacgaaagatgacatttaaggaaaaaaagctgacattgagtccatcactgtcatcgcttctgccataaagcagcttcaaatattaaaacatttttcatctgtgctgcattattggcaccagaaattgttttctctctgtctggtgcgcacttgaactgcagcagcgctccccggagactccggattgttactaaggcctcataacatattggcagttgacgtggtggtgttcatgtacacttgccactcacacggagcctcccctcccccggcctgcacgccaagccggctgcaaggggacctgggctctgtggctcaaatgcgggggacagcgggtaggcacatgcatgctctgtgatttcttttttgcagtctgcctttccctggccacgaccccatccttgcccctgtctgatgtccaagctgcccctgctgagacagacctggcctcttctggacagctccagtcacataaggactccatagcttgtgtgggctcagagcactttggctgcagagaggaaagtctttaccactgggcaggtagaagctgcttttccttttgtactcctggacctagcactctgctttatgggcactgtggcccctgggctctgttttatgattcagagaaataaggatgtctcagcttctgttcctgtccttacaggactcactagttcgtgatgaagatggtgacacgcccacctggagagatgtacacggtttccttggaggaagcccacggcctggagtgaatcactcaagcagagtgttcgctgggtgactggtgtcccatgagggcaccaggcggatcacattgaatataaaagatgctccttgggggccctcttagctcttgccacatggaaccctgagaagggcagggcaccttgggctggaaggaagatgctgtcagggcgtgcacttgtagaagaggagaggcgccaccaggcaattcctgggattgcatggtttgctgagagaattggggccggggacctcgggagccgtcacgcttgtgtggtcctagacattctcaatcactcccaccctcgccctaaaacttagtcgggatgcccttttctctctacgtggggaccctgctctagggaagaagctgtagggggctggtgtggccgggctgtttctgcctgtctgcatcttacattttacttctggcaggcacttttcccagggactggaacttcagcctcactccctaaattctcaattctcccagaatccccagcaaccaaccaaggggagctccaggggctgagggtcagtgaggcacaaatggcaggtggatggcaggattcctgggtgtcccaacccacaccgcacccatgtggcccttgggtctcagcacctgcataccctggccagcgtggggccagtgtgggaccagcatggggccagtgggaacacagcagcaggcccagtgcttactccaacctcaggactgggcctggggagtggcaggttggactcctccaggaggcacagcacctagaacccatggtgctttcagggcattgaataaaaaatgttttcatccaattaaaacaggaagaggccaggcccaaaggcctgtaatctcagcattctgagaggccaagacaggaggattgcttgaggccaggagctcaagatcagcctgggcaatatagggagacctcatctttaccaataaataaataaataaataaaatgggaagaaaaaaataaatttttagaatcaaagatgtggtttgtcattacatccatgtggttgtaaaatacaagtttgagtttttgtttttcggaggaggaagaggctcacaaagactaaagtgcttagggccttgtaagagggggcacatggccagggctcagtggttggggtaggggtctctggagcctggaggtggcctcagagctaagggacaggtgcccccatgaaacaccccaagcttaatttgactccaggccactgtggcttctgaactgatgcctgggctctcggcatagaaagggggactatgagagggagatctggggtccctgtccctcctctggtcactcatttcactcagtgggtgggtgggggtttaagggaaggaggaagttctattctgcagaccctccaagtactgtgcacacatctcctggatgctgggtcacccagccctgaattctggggagctgctgtccagtaaagagatataagcagtccataaaagactgcagtccagggggaaatgaaatggatacatcagagggactggggtgaacctgctggaggctggagtgatggggtgatctgcaaggaggggccagagcaacttatgaacccaggcatccccgactgccacgcctgtcctccttcccaacacaggaagtctttgtgagttcgtctgcttgagcctttgctctggcctctcccccttggtcagatggcccctcgaaggcctccgccctctcaaagagcccttcctctaagcccatctcaatgccccccacttaaagagtgccccattatctctagcagggtcactgggattggttctaccaccaatacactggcaatcattttctgatctcttaaatagaacacacagtccccagtcccaagtggctggtatacagtgggtgcttaatacacaacagcaatcttgaggaagcttttagaaattagcagatgtagaccttcatactgagctactttctaacaacttcttaaggattattttttatttattattcttagagacagggtctcactctattgcccagatgagtgcagtggtgcaatcgtggctcacttcagccttgacctcctgagctcaagccatccttctgcctcagccttgtgaggagctagaactatggctatgtgccaccacgcccagctaattttgtttgtttgtgtagaggtgggtgtctcttttatgttgcccaggttggtcttgaactcctggcctcaagcaatcttccctccccgatctcccaaagtgctaggattacaggcacaagccatggtgcctggctggagctacgttttaagtcactttgcagggaccctctctgccctgcctgctcttggaagagtgagcaaggggcttctccccacccccagggccaccttacattttatttattgagagcacttttccctgggaccaaaacttcagcatcactccctaaactcctgactgtcccagaatccccatccagcaccctaggagcaatccaggagctcagaattcactgttatcccggtagagtgtgcatctttgcctgtcaaggtacgccccaactccaaggtctgccacgcacccccacccccagagcagagccacagccggcagggtgggaggtgcagggaggaggagctccttttccatctacttcggccaacacacagggttcaggcaggcctgtggacaaggcggaggaactcccaggcagccaggctggcttcggcgtgtggaggcgggaggggcacagccaggtgcgagggaaggctggcatctggcgcccactgcctgcccacccgcccgcccgcccgcccaagtaggtctgggcttccctgcctttaataaccatccccaccgcagaggaacggaagctagaaacacaccggctttggcatttcaggcgagtcgagggtggattatcagggcatttagaagaaggggaagggaagaaaaagagcgctggagaccgggagaccacacagggagacagtgcacagagctgccgcagccatctgccgcgacttcatatgccgccccggaaactgacagacactgcttcagcaaggcccagcccgtcagatgagtcaatcaatcaaaaaaattcttatgaaacttaatcatagagggtcatgttagggagtggggaacagattaaattaccacagtattagatacgggaaatgatttctgtcaaaaccatctttactgcaattataatatgttaattatgtatttcattaagtaagtggattagagtctgcacagatgaaatcatgtggaggctttgaatcattcgccgagcacggtgggaggacttctgtgaatggatctcgtttaatttggaaaacttttgcatgcaaaatgtgatttttttccccttcttttgtgaccctggccctcagcctcagtggagaaaacgcccgggttgctgagaggagaatctgctgactgcctcctccatgctctgaagtcagcccgtgaggcccgtgtgctgggagccagtcccgggctctttctgtcttgcttctttcagcttgcagtgggcaaagcgatgctgatggcctgcaagggggatgggcacctctgggtgcctgctcatcttctagcacaattaggcaaagtcttcatgaggttcaaaaccaaaggacaaccagtgcatcaagaagacagccagggtaccatatcctggtgcatccacgtgtcttctggccacatcgcatgacatgcatctgcccttttcatttggcctttggggataccctgcccactgggaagacagctttaagaagctcagtggagtcccttgcaagggagatggctgccccactacgggcaggatggcccacagcgcacggggcagacacaatcagattttttgcagcacatatttcaggccagctcttcaatcctctctgccattgggccctgctgtttggtaaaagggctatttagccacctggtttccaggtatctttttttgtagttctgaagcaaggaatgggcgttgggcacacctgtaccaccgaagtccccttgggccaccatggtgtggtctgtccctccatagatggaccctagtatcttgtccctgctcatcctcagaatctaagctggacatcaggagcctgcccatctcagcttcagttcaaggcaacagaggccaccaaggagaagaccttccatatctctgcaactcttctattcttcttggcttctgaagatcttctgggatgtaaggggcagttgagtcataaacgaaataagagttaatagttattcttcagaaagaggaggtatccagtgcacatacatttcctgggtccctaagtattccattatcagtaataaccacagggaagttttgacgaagaggagaaaagagaggaggcaggcggacagggcctgcttggagtgcatggcagtgtaagtgacgggaaaaggttggctgatttgatgaaaaccccatcagcctctctagggagatattactttcctcattattccactgattggccttatttcatctgaagaatgctgtacattctttacaggcctggcaagcttctttaacaatatccagaaaaaaaaatctatcacctccttaatagaaacaacaaagaaattaacatgagccatcttcttccagggatcagtagagagacctggcctgatcccctttcttctgacctagccacccagtcttcaacccccaaaattatcaaagaaattgtttaaacgttgtacacataggatggttgagggaggagcttcttctactatatgacagcagctgaggatgtttcataaattccataaggagaacaaaggctcaagtctggatcccagcatccccctttgcacagaaacaaaatctcgatgtgattggatggttcaggaagaactcagttttcagggagagtctgtctcgatgcaagagaatcagtttcgtccctgatgaaacatagggcttctcttcctagcacaacaacagagagggaagaacaaaaatacactcgtgaaattcaggctgagactggcgttatcaatggcctggagcttgcaataactattaattaagtgcattttttcattattctttagcaaagaggtaagatttaatgatgtaagctaacaatggatgataatttaaagtggtgacaatagtttaattattcacacacacacaaaagttaactccataacttatttctttgtgagaacaagttcatttaaaatattttgaactgtgcatacaattatcacttaaactctttccttcatggctttgtagagacaaagagtcaattctccctgtaaatttctcactagacagttctacagatgaagaattctgcttaaaaaaaaaagaaaaagaaaagaaaaaaaatcgcaccattgggttttgcctagaatgtcctaggtctcaggaatgggatggatggttccatattactgtgtctttccattccaataagcaggaaccaaactcatgcaataacatgtgtatatgtgagcgtgtgtgtgtgtgtgtgtgtgtgtgcatgtttatgtggaaggtgcttctgttttttgtcagcccatcccagaaagctcgtttttccttttcgctgactattcagagttggagatgctatatgtggaaggggtgaggtgggaggattgccgcttcaggggtgattagaaaagaaaggaagaagaataaataaatactgtaagtggaagacatcctcttgagttcacagccttttcatggctttgagacaatataattgtaacatgactgagtattcaagcagctggacctcaccaaggatgttcaggagtgccagagctctagggccctgggaagagccagtgtcattgcagggagctagagttcctgattagggatggagtagaaccttcacgattatcctgtcatggaaaaatgcagaatttaaccatgtccagtgcccagtccattcctgatcctaacttcctctgtgcttccttgctgtgaaacacctccactgttaacagcagctccagggaccttacagaacccaatggagaggcatctgaggcaccatcaccagacccatgccttgaatggaagcaactcaaagtcccaatggacccaaagtcatgaagccatgattaggaccacacagtgcaagtattcagatggatattttataatatcaaatatataaatggatttgtcaagccaacaaatacttgaatattgttaagcatttgaataatccaatataacaacttcatttaggctgtcttttagatgactcatttctcagtgtaattatctcactggatggtttcatggatcaggaactctggttagaatcatactaatcctgccattggagttcagctgtttactacggttgggtgttgcataaagttgatgataccgtgtgacataagatactgatgtataaaggccagttttctaccatgattactgttcgtcaaaaagatgtttaggaaaaaatataacatggcactcaggattcctactaaaaaatgtacattctagactataagtcttctaaactctggtgaaacattctacaaaagagaaagactatgtgtaaaattaattccctctccttcatcttacttatagagaaaggagtggaaggacagtcatttaagctgagaataaaatggattgcagttttggcagaataagaaactctatgatcatcagatggtgatgtctgattggtgtttgataaatatcatccatagtttgttgaacagacatgttctcactatttaaaggtactccacataccacgtagttgctatcacttgacttcttgttttattttgtattatcataaattaaactttttgttgttgttaacttatttattgtcttccagagcaagagctttgtccttcttgtttgctatggtaatgcgggcctaaaacagtgcctggctcagagtgagtatctaataaatatttgttgagtaaatgactaaatatgtgcttaatatggttgttgactgttaggtaattttccctcccttagtctagtaagtgtgttgacataattcatttaataaagagattacaaaaatatcacctttggtggatagagttattggccccaattctcagccttagccctgtgtttagaactttgccttatgagtctgtggttcttcccattaaagggtggagcaaatttcttcactcttgtgtttgaccaggagactgactttggccaatagcaagagaggaaagtgatggtatcccagttctgaacttcagccttaagagaacttgcatgtttctgctcatttcttgtacttctgccatcaccatgaaaagaacatgcctgggcttacctgcagggcccagaaagagagcaccaaacactgacagcagagctacccagcagagccccacccgtaggtgccttgagccccagccagcccacagccacaggaatgacagaaatgtttattgttgtgtaccactgacatggtgtatttgcttgcagtgcaacaatagcaagtccacacataatctttctctgactcaacttcatgtcatccagtcccccagatggatgaccctgtacccaagacactgaattggcccaaatgaccaagatagatattatacccatgtccaagccaggacatctgtccttcattcctcagtggacagtagggaataaagaagagaaccacctgactaagtgttgtagaaaaaaaccaggttcctgtcacatgaccaggaaaaataagccatgcagacactttgaagggctggggataatggagtttattgggtgaaaaggaagaagactctcagcaaagcaagaggggttcatgttaacaggccccaatctcacagattgaatctcaggtcagctcccagaaacaggagagaccagactcctatcaccgcaaatggcttgaacttcccgaggttccatcccatcctcccagtgtgcaggtgggcatttttcagagagaatcaggaaagtgtgggcttcatttgagacctgaagtctggttttttagccttcaggctgttttaggcttgaaggcagggttttgtggggggacacttgctgcctcctgtctctatcataagggccaggacccttactcggcacttgccatgtgttgtctcattttgtcctcatggccgtggtgtcccaacttcacaggtaaagatgccaggtttgctgaggggacaccccttgcctctgttctcccacctgggaagagaagtcctgaaagcatctttcaacagtggttcttggagataattccaaagagaaggaccagccctgtctggaatcagagcaaatggatggaaaagcagagctagcgaaccaatcacctgcactgtctccatcagccccatcctcacagccgcctgaacattgaatctggcctcatctagacgtgatcccatgctctccctgggactatgttacttggacaaggaatatttgtcctggaatcctttgtaccctgctctcttacttgccttagataaccccttccgacagggagcagaatattacataagggatgctggaactgtgccttcaagatgacagcatttttgaaacaaaggcatagccataaatctaatttgtttctttgccaggctttccaaacacagcttcgttgtaggaaagtgaccatcccatcagaaaatggaataattgtgacttgcattttgaggacatatctttccgcagcctgggcgctagttcacgcattcatgtgataaatttctactgaaggcacactgtgagtcaggcaggcttctagggcctcggggcccagatcattctcttaaattagtgcccctttgttttggaagcattttagattagacgtcctttaccactgcttaccgtaggactttagatggctttcagacacacacccaagttctcgccttcgtctgcccctgataatttgacttctatcttgccttcctagcctctacctgtttccacctgaggtttccctgccctaaatgctcccctccatttccctctaacttgttttccaggacaccgatctaatggcctcagagagcaaggggccttccccaacttcctggaggagaacctttcacaagtcccttagtgacaccattgggaataataaatactttgtgacatttgatgcacaataagaatataccctgaataatgatctaatgatcacattgctttgcttttgttattgttgttaaccaatctggctcaactattggaatgtgtgcctctttcttcaggtcagggaccgtgttgtgaaaacctgagttcctgggacatattatggaagaagcacaataaaaacagatgggccaatgttaatttgcctattctgcttattgtttattgtatatgctctagaatgtatgctccaagaaggcaggactctgtctgttgtattcaatgatgtattatgagtacctggaatagtgtcaggcacgtaataggtattcaataaatattgttaactgaaagaacagttaggagcagacagagaaaatttttagcacttgtgtaacaataataattccagtctccaaataccttgtcttttcctaaaggcagtaggtcttcccgattccgatgcccacagttctttgttctccctataaacaaaacaagatattatcagtgggataagacatcccactggcaccagtttttgtcggtcgggagcaggagcagatatcagccacccagggcatctatttaaagtgaagaagctttgacttctggatcattatccacctgcagaagcacaaagatctttatgggagcaccatcttttttggtgatcacacctctggaaatgatgttataagaccaggaaattgatttcctgcattgcaaaatcattcccagggtcatcagtatcaaagccaagtggttcatggatttttttttcttaagataaagtgcaatatgctttgtgagttaagcttaacaagatgtgatgaaataaagtttatcctttgaataagtgtcatggcttaacacaggcagccgatcctggtcccttccttaatcatgacctacagaattgacttcctcctaagcaaaaagttacggcactgagaaggtagctgggtgcatggggatggggctggcaggccacttctgctgcccaatgtgaccaggcccaggagtccctcatgcagcagcgatgagactgaagggaaaataggcactttcttgcctgagagcagggtggtaaattgatacaaccattccagagagcaatgaggccctaggtacagaattgaacatatattgacattctaacctggcatttttttttgtgggaatttaacttaaagaaactctttggcaggtgggtgcacaggaaaaccagtccatgaaatgtgttctagtggtgcttgtaatacaagaaaatgatggcaagctatctactgtcactagaacagtagataaaacaagtcttgctatattcaaagagtaaaagactaagtagcagctaaaatgatgaactagagtaggaatcagcaaactgtggccagcaagccaaatcttgtctgtctcctgtgtttgttaataaagttgtattagaagatacccattcatttattcacatattgtctgtggccactttttgctctaaaaggttagagctcagtaggtataatagatactataagatccacatgtaacctaaatgcctggaagtagttacaatctagcccattacagaataactgtgctggttcttcttaaaagagagctgcatagatcaccaatacaaaaaaatgttgaaggaaaagggtagattataacataaaatgccatgatgctgtttatgtgaattaaacacaaacatatatggctatatacctaagtacaggaaagtggcacagatgggctggaaggtgtcaacctatttcatgattctaatcgcctatgggagggcccaaggagaatggactggggctgaagggaatcaaagtctatgcaaagataatgacttattccttctgctgcatagacttgaaataaatataacaacattatgctcccaagggaggtaggcagagtccgcaggatgcaggcctcgatgtttgaggcataggctgcttctaagaccgcttttcccagccctgcctcaccctgtggtcactctcgtggtacaatgaacaactttgtcaactgcacgtggcagacaactctgacctgagggctaaagttcaggcagaacaatgtattttagacaaataaataattgggattgaggacaaaactatagatatacatataatttggaatgccctaattgtactttcctactgctaacatcaccacttaaaaatgtgagatttatctaagtctgtgccctccaaaaccatagcttctagccacatgtggctactgaacactcgacatgtggctgggacgaaagaaaatgtactatcaatgtaaaacacacaccggatctcaaggacaatagagaaaaaaatatatgtatctcattaacaattcatcctatccatggcaggttaaaatgatcatgtttggtataccagtggattagtctactattgcagctgtaacaaattacttcaaagtaggtggcttgaaacaactccaatttgttatctcaccattttgtaggtgagaagttcaatgcaggctttactgggataagactgagatgtcatcaggactacattcttttctggaggctctagaatggtggtccccagcctttttggtactagggactggtttcgtggaagacaaggtttccacgagccagagttggggatggtttcaggatgattcaaaaatactatatttattgtgcactttattgctatgattgctacattgtaatcatataatgaaataattctacaactcaccataatgtagaatcagtgggagccctgaactcactttcttgcaactaggtggccccatatggggatgatggaagatggtgacagatcatcaggcattagattctcataagaagcatgcaactagatccctcacatgctcagttcacaataggggtggtgctcctatgagaatcgaatgttactgctgatctgacaggaggtagagctcaggcagtaatgcaagcaatggggagtggctgtaaatacagatgacacttcactccttctcccatggcaccactctcgctttctcttatgcctccctcttctacgtttgtttgtttgtttgttttgagacggactctggctttgtcacccatgctggtgtgcagtggcgtgatctcagctcactgcaacctccgcctcctgggttcaggcaattctcctgcctcaacctcctgagtagctgggattacaggcacccatcaccacacccagctaatttttgtatttcttgtggagatgggggtttcaccattttggccaggctggtcttgaactcctgacctccggtaatccacctgcctttgcttcacaaattgctgggattacaggcatgagccaccatgcccagccatccctcttctacttttaaggaccttcgtgattacagattatctagatcacatccctatcttaaaatcagctggctagcaaacttaattccatctgcaacctcaatgctcttttgccatgaaacaaagatttttgaacaccttcggggaggtctttattttggctatcacaattgagctaaataaaaatattttattaaaattaattttacctgtctctttccacctttttaatgtggctataagaaaatgtaaagttgtccatgaagctctcattctatttctattgggcatcactgcttcaagatgtgaatgtgcttcaccaactataaggtaccttgatggtgaggaatgttaattgaaagaaaatgactttttatgaagtgacttttattttttttctttttttttcagataggttctcattctgtcacccaggctggagtgcaacaatacaatcatggctcactgcagcttcaatctcctgggttcaagtgaacctcttacctcagccccccaagtaactgagactatagctgcatgccaccatgcccagctaatcttttatttttcatagagatggggtctcactatgttgcccaggctggtctcaaactcctgacctcaagcaatccttctgtctcagccttccaaagtgccagaattacaggtgtgagccaccacaccccagaatgttgctcttgaagatagcaaaaacacacttccccctggaggaataaataatactacgatagctcacatttagtgagggcttacaatgggccaggccttgtgtttaaatatcagttggtttcatctttatattaaccccgagacaggtactgttgttctttatgtattgcaagtaaagttgctgaggcacagataggttaagtaatttgccaaagtcacacagccaacaagtaggagcacaggctgtggactctggaggcctccctctaggtggtgtgcacgtgttagacatcagtttgcactgtaagatgcatgaagggtgctgttcttagacacaactggcaaaaacaacaacgctctgcggtctatctgcccctctgccaagaaactacaaaagacacctcttctttgtgcagctcttcagagtgacaaccctggtatctaactcccagccataaagcgaatttcccctggatactctgtcttgaggcagccctccaaatgggtatttgagtctggctcactttttaagctccacgtgtgactaattcccaccagacagacagcagcaggagtccagcagctgcagggaaaggcctcagcttctaaggtcttgaaggaaagggatagtttagccacacacatattcgcacacacacacaaacacacaggcacacatacatacacacagacacacatgcatacacacatatacacacgtatatacacatacacacacgtatacacacacacatacacaaaactacacacacatacacacatacacatacacattcacacacattcacacacacatgcatatacacacaatttaaatatctctatacttatctctacttaaaatatttgtgtatgtccaaatgaatatatatatatgctttaaatatctttttctgtatgctgatatatgtatgtctgtgtgcacatgtaaatttgtcatgcatttccttgtctttctcacttattttacccaactctttctctcttaaatgtctctacagctcaagatttccttacatagttccaaagttaaattttatttaacattcatttatatatctttgcgtgcgtgtgtatgtgtgtgtgtatctcacatggaataattcctgatcaccacacatatatgaatgcctctgtatgtgtataaacacataataaaagtacatccatatcaccaagaaaaacattttaaaaattattttggtgagcctagattctggatgcctgatagcggtatgatttcctacagtgtatttaaccaaaccccactccagtattaaggagcacacacaactagaattatattttactagcagacaactctgaactaaggactaaagttaaggcagaacaacatattttagacaaataaataattgagattttaaacagaagtacatgcatagatataatttggaatgccctaattgcattttcctatgctaacatcaccagttttggagatatgggattcacagttttagggatatgagtcccacagtttctcctctttagaattcgctctttacttgacctcccttaggcacacacaacatttcctccataagagatgttctctgagtcgcatctgcatttcctaatatctggaaacccctctgggtcacccttcccctcagtaactttgggccacctcctgggccctgatgtgcaggatccaatcaggcagacgtgcagtttgcatttttagaaccggcctattctgttcctttgccatgctgtggcaagccctttctgtaaagggccagatagtaaatatttttggctctgcaggccacacggtctctgttacaactcaactctgccattgtagggcatgaatcgtgggctatatgtaaatgaagaggcatggctctgttccagtgacgctatttcaaaaacaggcgatgggcctggatgtggcccactggccatattcctgacccccgccatccaccaacatgggtcgttatctcctgatatctgtaggtcactttcacatatgtctagctgaggtacccggtgagtattttagagcccagggaactcatcagtggctgtgctcatgcataattaggtggtgaagccaatgtggtgatttgaagcttcgttatttgctcccctgattttattctccaaggatctgtgagttccttgcgtgtcctattgatcactttttccccagcaccccagcacagtgcctggcccacagtaggtactcagtactgatgaaatacttaaaaaaaatctgattataatctaattataatcaggtagaatttaaagtataatattcattcaatactttttcagaaagtggtaacatcactcttgaatggataatggaaatgttgctattatcgggctgtcagatgaaacaataatttatgtgagtcttgcaaatagaggagggggaaattatttcctggcccgcccaaatttgtttcagacacttgaatggatgaatgagtaaatggatgacggcttttttccgactttcttggattttcctggggcatggagagctggagtcttgcctctctttccttttccacctcacagcacacgtcattttttgatcatgaaatttctttaccaccaagatcaggcaaagcctcagaatccttgtcaactcagctccctatgcaggtactcacaatcagtccaagttaacaagtgctgtgaaatgtctttgttatccctaaaccaaatgttttcttgagcatctactatgtgctcagcatacatgaggttaggcaagattaacccaaagtagggaggtaacaaggaaccatggcacagccaggggtgtcaacataagtgcatgggcactcagagagaccccgagacctggaaagcgtgggaagtaatggaataattccagttcttagaggacccactttgtctcaggtcctgtgctacagcttttatgtgccccactgaatcacacagcagccaataagctaggtctctctcattatctagagaaggaaactgatgttcttaacattcctaggagctgcaattgacacccaagccttgggacatgaagctgtgaaaccaggggagatgaactcaggtgtgttcttaaggatgccaagaggaggtaaactagtgggccttacagaaaggataagctttgttggaaaagaatgtaatctttggcctatttcatcagtctgaaatatgggtgcacatgtttaaatgggtagatgggtgggagggtagatggatggatggatggggccagataagctaaagcatagggtttgaggttgagttggtaacactaagtctggaaagatgaaatctgattataaagggccttgaatgccaatttttagaactcagatttattctgtagtggagaatagagaggcatgacagtttcagtggggagtacaattattggtaagatgctttaaaagatgactatggtggctgggcacagtggctcaggcctgtaatcccagcactttgggaggccgaggtgggcggatcacttgaggtcaggagtttgagatcagcctggccaacacggtgaaacccacctctactaaaaacacaaaaactatccaggcctggtcgcgcttgcctgtaatccaagacacttgggaggctgaggcatgaaactcacttgaacctgggacgcagaggtttcagtgagctgagatggtaccactgcactccaatctgggtgacagaatggaactgtgtctcgaaacaaacaaagaacaagaaagatgactatggccccagtgaggaacatggattaaaaggacaggctggggcacacagctcagagaggtgattgggcaccaataatcccatcaagaagagctgcaagtatatactgggggcttaccctgcaccaggcaccctcctaagtgcttcatgggcattttctcactcaatttgtgcaagatcctaagaagtaagtgcgtgtttatcatccccatgttacactgaggaagctgaggtgcagagaagctaagtaatgtccccaagttggtgcttacagtgagcaggtggtcgagctgggagtctcacgtgagcggctggctccagagtccagacccttgaccccgacacctttttggtggtcagggacagccagaggtctagaggacagtaaaggggataggcattggagcaacaggaaagagaacgagaccagccaggtggctgttttagagcttctcaggccatcgacccagaacatcgcactattgcccatggaagctgaatgccccgctgttcctgcactgcgaattctggggacgcgctgttgacctggacccctgagagaaacccaacaagagcccctggaaggatagaaatctcaggtatgcaggattgcatacttattcattaataaccaaagaaagaaacactaatatttctttataaacgtgaaatgttagacactgttctaaatatttccctggcagccacctacagcctagcacagtgcttggcacagagcacacactccatacacatttgttgaataaatgaatgaatggtgagtgaatgaaggagcactgtgctaggagccagagcctcgggtcccagtctgagcttctccatcctcctgtttgatagagcttacacaagtcacaccgacctctctggacctcagttttggcagaatgatgggcgagtgagccagggaattcaaagattttaaggacgctgcgtgcatgaaggctcctgttccagcagctctccccggggtgaggtgcagctcccaccaagctctcctcctttcccccctttgtggctgctgcggtggttttccctctctgcaacaggacatcaaatggttaatacaccacccatcgtctttgatttatgaagtggccgattggaccaggaaacacaacacagacagccttctcacttgcaggggagaccccagagagcagtaattctgtgcataaaagcgagcggcagcctcgggcctcagtggtggtggaaagcccaccctgccgagcccgtcccggggatgatgccagggccggcgtttgttcctgctctgtgcagggacagaggcggctttgtcacctggcccctgtcgtccacccagccccggaatctccgctgcccagcctttgccctgagaactgaagtgcagccctgccccggtcaccgcttagcggttcctttcagcgtctgccaatctatcaagattcagctaccgctgtgaacccatcaactccatggaaaggaaaaaaggaaccctcaccacagcaattatttatcctggcctgaacttcaggtgacctttcccaggtccacagaagttgcagatgggagcaccttggtgtgtaggattttttccccactgtgtccttttaaaaaacacattttttttcatgacatgaacctcttttgcaaaattttcttttgcaaaaagatctttgggtggtctataagaccacaacaggggtggaacattggcctacctagagcacagattggatgtaaacgaagtcatccaaagataaaataaacgaagaaacaaaaactgtgacctcatggggatggtttcagagaagacccgagtgcagctcacccacaggccagctcagccctcggacaaaaataaggggctgttctgcaccaaaggctctgccctgacccggggagatccaatattgtaaactctgtgggtgggtatttgtgtgtgtccccgaatcagagaaaaatccaggccataacaaggactatgcagggtgtaactccccgtgtaaatttaaagtgacctaagggacataattacataaatctcatcatgagacaatatactttttatttgtttgaattttatttgtattggtaaaactgacctgaaactgacacaagtttattagaaaaaggactctgtaaaagcaagtgggctggtcttcttatttaagatggatgtgccgacttctagtatgattagagaaatggataactcactaacatctgtgcaaactacaataaaaagggatttagtgttaccccaaggaaggcaagagaggctgtctgtccattaaacgctttattacagcgccagcagcttttttctaattcagttattcctgcacagcgttcagcactctgactgcctgtcaacccaccagacagtgctcggggctgggaggttttgtgcaaggtaggtgacaatcaaatgagccactgagaagagaggggagcctgaccctcgtgaaggattaactacagaaagtgagtgtgatcatgtcacaccattacttagaattttcacagtcaatttctgaaaatatgagataagttcttaaagaggcagttgtctcaggagctaagcagacccagtgtggttttgttccatgtgacagggcagggagcctggagaaagagtagggacttcgagggagagggaacaggtggcatcagcactgtgcctatcctctgtagggcattctagagccaggccttggagcaactggctcccaggaaggctgcagccaagaagggagaggatggagagatgccttctgggaccaagatgccatatatccctcctccactggatgctggaatccagcctctcctggggtcaactgggctaatgaacatgaccctttggtgatcatattaggctttgggttcacaggaagcctgtctagggcagtcaagatgccggtgctgggatgaaatgtccatcttctatcactccttttcacccctgcaactgctacaaccaatatcatcataagcttccccaaaagactatatgcccctacggcatgcaaaaagatccagtcccacaggagctcacaagccacatgcttaagaaaagtactatatgctcaacacaaatatacttgagatatatattttcaaagcctggcaaaggtagatgacagtacaaggaagcatggcacattttggggccagagatgagtctgtccctcatttatagatggcagatctttaacacaaaaaggggaaggctccacccagagcacacgcaatctttgggaagtggagctgagaccggagccccatgttcctgatctcctgaccaacagaagttatgctacagggcttcacgcagtagggctttttgagaagatggactggaaatgtgatttcttcctttgcatctatatatttaaatgagaaaagtaaaccacaaacctctaagcttggttctgctaaagtaatttaacatctgctgccacctgaatgtaattgaaacaattcattatcaaatttactgatctgcttaatgattttgtatttctctttcaaaatcaccttcctcctaagctagcctaggtaaattaccctttgcttcaaatctgagagattgaagggacctgggagaacatccaattcaagccccctcactttaaaaatggtgtaacagtgttttgtgtgtccatggtgaggttgcagacctttatcgaggtcacagagcaagtccagcaagagttgaacacaggctgccagaattccacccttgtctcattccgagattgtgtgctgagggttttcaactgcatctctaaagggaaggccaaagaaagagcaacaggaaaggatggtaaaaagggggtagaaaggaagaaggaagggaagaaaaaagggaaaacagcaagctctctttccagagccacacatttttttctgtttgctcagtggcagtctgttaaagaaatacttcattgtcactgaacacagagtcattaaaggcaccttggaaatttggacccttttactagaatcagggcttaaatagcaacttaatttatgacacttctcgaggctgatggcgtttttgctctaaggtaaggtcatctcagtatatacccctcccgtcgcttccctttagaacacgcagaggcgtttcctctttactttcaagttactgattattcaactgctcaaatgtaagtcacatatgtatgtaggcacgtttgagtccacggtgtgtttctaaaagagagctcttttatatctgcctgtaaaagaggagagctcaaagatgggggaacccacaaataagcaagtgaataattagatcagagatagatgccaccttttctcagtgttaaaactgtgaggggaaaaagtactcgtgcataattgacataattgatctagtatttttttttcctttttgctgcagtaatttttatgcatgccattgttgctgttattatccaagatgtgatcttgcgtggttgataatacaggctagatatgaatacgcgtacgcaccagccaatcacaaatctatagtgtctatttctgcatcaccaggtgctatctcatgggaaatatcctcttttttggcaggcacacagagcactgcattatctgtcattttcattagattcaagctacagctgggccaaaaagacttagttctagcatatgtgctcaaaatggccaagctgcgattgtccaaattcaccctttcaagattgcattactgaacaactggagccaaagctagaaattggagagagcaaagcgcctgaattccacttggaaaatggcaaacaccataggctctgaagattgaagcgtattatcatgactaactcaaagggtcagaggagacactggcttccaccagcaagctcaacgtcttttggcacatctgaggtggggatggaagctgcaagagcctagattttgacaccacttaacaaagaaaagccaatgtctttcattcccctctgtgcctttcagtataccttggccatgtggaatgcaataggttctgtacccaggtcttgacctgggccagctggtcttgagccccgtaggacgtagtctgtggcctgctgcatacttggatagtgtggggtgtataaaaagcaactcatcctgagggagaaaagcatccaactgtcataagcttgagtctccatgcaagtctccactattttataaattcagttctttatgtgaacatgcgaagaagacatattgaaaaattagccccacaaagaaataaatacaaaaatccccactccaggttgctggaaatgggagaaccacagggctggggaagatggtcactccacccagtggacttcatgttatttgaagcagacattgaaaaaaaaaagagagagagagagagagactagttgttcaagcagagaaaaagaaagtaaaaaggccagtgggaatgtaaaatagtgcagccactgtggaaacagtacaggggttcctcaaaatattaaacatagaataaccatatgacccagcaactccgctattgggtctataccctgaagaattgaagagatacttgtacacccatgttcatagcagcattattcacaataaccaaagtggaagcaactcaagtgttcattggtagatgaataaatgaataaataggcaaaatgccatagagacaaagtagaacagcactcccaagggctgagaagaagggggaatggagaattactgtttaattcagggttactggtacagggttccagctggggaagatgaaaggattctggagatggatggcagtaatgattatacaacaatatgaatgcacttaataccactgagttgtacacttaaaaatggttaaaatggcaaatttcttattatgtgtgttctaccacaatgaaaaaaaaggaggtttgtgtctggtcctggagacacagactccctgagtctgtgccgcagcaacaccgagcaatgctgtgatcttccagaatgccagtaagggtgagcccttggccatgtgtcctttgagcgatgtgcaaagttccaaagacagaaggaatatctgggatttggttatgaggatatatgctgccctagaattgtcccaggttttcatgccagggtggagacctcacacaccatggtggcaggggatttctgcagggagaagtctgctgacaaacccatcttatgggttctggcatcttggccacagacagcagtcagctgtttttcatctgcactgctaatagggtctagctgaatggctaacaagcaaggtgaaatgtagcatgaatgttttgaaagccatggagcctcactttgggttcaggagtagcaaaactagcaagaaggtcactgttgctgattggggacaaatgtgatgagtgttgggggcttaaacaacagggatgtattttctcacagttcaggaggctgcaagttggagatcagggtgacagcatgatcaggttcgggtgagggctctcttcctgacttgcagacaagcacctccctggtgagtcctcacatagggattgatgggggaaacagagctctggtagtctcttcctctccttataagggcactaatctcatcatcagggccctaccctcattaccttatctaaacctaatcgcctcacaaaggtcccattctccaaattccatcatgttgaggtgtagggcctcaacatatgatttgggggtttggggggacctacattcagcccataacaaatgtgactcttaccttcaccaaaccattcttcctgcagctaaagagagcatcccacatctacatgctcttgggtcctgtggtccatctgttctcattagctgtaattctttgggttccatatttctctcatacccttccaagtccagctagactgcaagcatcagtttatgaataggaaattaaaagtaacctacaaaacacctgattttgaaaagatgtttccccacaggggccctgttgtctattaattgtagtgctttaaaacaaagtaaatatttttttgttgttaaaagaaatttcttcttgcattttctttccattatcaccccattaatggagacgaggtaaggcaatctgaaaacatttgagtcagagaatatacaaacaaactttcaaactgtctttcagcaagtgaggctaaagttattgaatatgcaaattggcttattaaaagaagaatgatgtctttttcagcaatcagtttaattacagtggaacccttcaatggagaaatcaacttgtttcttagagtagaaattctttagaaagggaatttaggtataacagatcaaaattagaaaatttacacttggtgggaaaaatggtctcagtaaagaaaaatgtacacttggtagaaaaaatgaggtggtgggggaagaggaagagagatgccagtaccccgcttggtagccttgcctgggtctctgagccccaggctatttgtttgccattgtcctgctctacagcttgaaggcggtgttaccaaaatgccaggggtttggtctagatcacgtcgctccctgcacagaaagacaatcactgagacaatgagtattgccagggaagaagactttattcagatgatgcagcccaggagatgggagatgagtcccaaatccatcttcccaactgattcaaattaggggtttatatagcagggaagaaatgtaactatgtgtgggaaaactgaaattagggagcagtctggaatctcagagtttggatgtggtgatactatctagaagccagagaatcagtttcctgagaaaaggactcagctcatacaaagataaatttcaagctttaagacagggagggtgaatttctatgtttattcaaaaaagaaaaaaaaaaacccataaacctcagttctatgggacaattaggcctgtttcaaaagaaaagatataatggcctataaaaggtatttatgcccaataactaaggcctcatactccctgtggggtaggagtggatttttttagggttgggcccatgtgcaccaggaccagaattaatgtgatgtcagtattgagaaggccttccatcagagccctgtccattctgccccaggcctttccctttcccctcagaggccagagttccctgcccagtgtcccatttctccaaaatcttctccccgctcaggtattagagatctgagtaaccatgcaagcctctcctcagtgaagacccatttgttcattccaggccttataggtctgttttaatggagggtcccgtggttggggggatactggtccttcaagagacaccaaaacaaccatgacaactgagaaagatctctggagagacctggtctggaggtacacttcacccatgtcccaccctcagctacctccatatcatagtgcccttggaagggcggccgaccaagatttagggcagaggtttgaagtcacactttttgggttgactctctgctactgacagcatcaacttagtgacaaccagcaagttgtagatcctctctatgcctcaatgtgctcatctgtaaaatgggggcgataacactgtctgtctaataggatgggtttgaaatgtacagagaaaatcaggcaaaaatttggtataatatttgtcccactgcaaacattccttcaatagtcatggtggtggcagcagtacaaatctcccatgtacactgctttgttaccttagctttcacacaagtctgaaatgcaaaacatgcaattcacacatactcaagaaatgcacaggcaagtgttccttcagtaaacttcaaattcttcagcagagaacacacgccaacagtgaacaaaactgggaaaacaatccctatactttaacgttctagtggaaagacaaacaataaataaaaagcatcatgaacataaagatcatattttatttcagaagtatctgcagggaacagaagaatagaacaaagtaaagtggtcagaagacctgaagcaagctaagcagttggcagcggcaatgtaaataggatgaacaagatcaggctcattgaggagaggttgagcaaggattttaaaatggagggagccatggaaatctagaagaagagaatcttagggagagaggcaaaggccctggggcagaagtgggcctgacctgttcctggcacagcagtaggtcagtgggaatacaaggagggagtggcaggagttgggaaaaaacacccaagatagggacagaaggtgatggggctagatcatgtagggtctcagagccaccataagggctctagctcatgcttagatgaaatggcagtcctttgtagggctcttgagctgagaagtagtattaattatctgactcttatttgaaaaggaagatccaatgaccatgtggtgggtcacttgggatggggcacacatagcctggaggtgagggaccaagctggtagcagcagttgtggatgcgagaatattctaaatgtggaaatattctaaaggcaatccaacaggcttacctcacagattagatgtggggtctgagagatacagaggagacaagatgacttccagattgcatttaattaatgcaaagtagtttgtaaacaaggaatccctgactaccttgtttgttgtgaaaaacaataaatctacatttactctcaattgctaagtgcttacctatagtgtttaactcagtacaaaagactatactgcacatttaaaaatgaggtcacattaagaatatgtcatctatgcctcaggtgaggaatatgctcagatgaggacattctgggcatcaggtggtaaatggaaagcactcataagtattttacttctgtctgtttcttgaaaaaatatgttcccatcccagggcatttgcacatgctatggtttgcacctaaaatgttcttttctaagagctttgaacatctggctgtttctcctcatcagctcaattatttcctccaacctggccactctctcccaccggatcctgttgtattagtcaaggttttccagagaaactgaaccaacaggatacatagatgtaaacagatttattatacagaatcagctccctgtaatcccagcattttgggaggctgaagcgggcagatcatttgaggttaggagctcgagaccagctttgccaacatggtgaaaccccgtctctactaaaaagtcaaaaatgagctgggcgtggtggtgttcctgtaatcccagctactcgggaggctgaggcaggagaatcacttgaacccaggaggtggagactgcaatgagctgagatcatgtcactgcactccagcctgggagacagagcgagactccgtctcaaaaataaaaacaaacaaacaaaaaaaaaaattggctcatgtgactatggtggcttagaagtccccagacatgcagtcagcaaaggggaagacccgggagagcccatggggtagctccagtttgaacccagaggcctgaggaccaggagagctaagtgtacattccagtctgaaagccagaaggctcgagacccaagaagagcagatgtttgagctcaagtccaaagacaggaaaagaccagtgtcccacctccatcagtccatcagaaggagctacctgttcctcctaggaggtcagtctttttgttgtattcaggtcttcagttactggatgaccaccccacctcacattgtggagggccacctgctttgcttagcctaataatttaaatgttaatctaatccagaaacactctcacagaaacacccagaataacaataatctgggcatcctgtggcccagatcacctaaaatgaaccatcacacctggtgtgtcccctttgtattggtattttgtgactttatcttagttatttatctggttatctatttatgggtttgtcttctctgtgagagtatcacatccaccagctgtttcttgaattaatgaaatactgaataaatgaaaactttctgtgtgtgatttgagatctaggagagagaggcatggaattttgctgaggcaaggtgacattggtatggaggggagagggtacttgatgagaaccagaaggagccagggggctgaacaggagtgggaccaggagagagattgggaagaaagtagactggatgggatcaaaccttatgggaataaacaaaaatccatctctgacagccaaatcccccctgcatgcattctggcttttatttttaatctggagcaaaacatcccctggcctgactcctctgacttgggtcccacacagcaaatcaaagcccaaacagggcgggtcccaggctgggctttcctggaaaagtgaggagtggaaatgagccttgtggtctcaccccagccctggaaggccatttgtctgtaggataaaggggtcaggcaatggcccagttcatcatgactggcaaggctgccccaagaggcccagagctggatagacacaggtcagtttcctgcacagccagccagccctcggccgggaattcttacattgcgctttcctgttggcacatacggctttgtgttttgttgatcaattttaatgaaaaaaaataaaatgaaataaaggagaagctgtcttcaagtgttaaatgttatgtgcataaatcttgctaaaactgtgaagagaaatacccctatataggacttaagctaaaatcatctctcccaagttgtcatgtttttaatttgtttgtgttttttttacaaattttagatagaataattggttttagaagcattgctctgataaaccttcctctagggactctgtggagaggttctggtagagttgagccatgtgttcagggttagattgggtctcagaggctggcacaagggtgacatgaaggacaaggttcctccttggcagggtcttcaggaaagggagcacatcctagtggggagaaggaggctctggctcaggcccttggtgggtacaaaggggcaggagtgcccaaggcacagggcctcagatggaacagctgtgtgtctgctctctgttgctctgagtggaggcggccagtggggccctggccaggagcaggcagggagtggtgagcattcttcccccatcttcctgtccctgagcactgcaggcctggctggcatcagcctttacttagccccgcatctctgcccagtacttgggaaggttctggtctgggaatcaagaagatggagacacagccctacccttaggagcctatgattattacttctctgtaaaatgagagaaggctcactcagagacaaggaagggaacccatgaggggctgcaacttgggtctgaggggaaagttctgtgtgggctgaaggaggaggaagccctctggggttgggggcaccttgagtcagttttcacagtggtaaaaagagagggatctctaggtaggtggtgcagactgaggcaaggccaggtggtgagaataatccagcccaggggacatccaggagagaggcttggctggacccaccagcagaagtcctgtagatccatccggaccaaaggaggtgagaggctgtgtaggggaggaggggtgggcacatgtttcagagttgacaatcaagtttctaactatcacagatgattttggaatatatagttggaagagaactcagatgagtcagtgagaagtgatctgaaagaaaaatggagaaagatatgaagagatactttacagaagtgaatatccaaacaacccatgaacctatgaaaatctgttcaatctcactaatcatcagagaagtgcaaattaaaaccacaatgagtccaagcatggtgtttcgcttgtaatctcagcactttgggaggccaagtggggaggatcttttgaagccagaagtttgagactgggcaacatagcaagactccctctctacaaaaataaaaataaattatccaggcatggtgacacacacctatagtcccagctcctagggaggctgaggtgggaggattgcttgagctaaggaggttgagcctgccatgagctgtgattgcaccagtgcactttagcctgggtgacagagactctgtctcttaaaaaaaggaaatactgaaaaacaacaacaacaacaacaaaaaacacaacgagataccaccacacaaactggcaaaattggaaggacagaaagtaccaagagctgacaagaacctggagcaaacagggctctcatgccctgctggtggaaatggaaactggtagaatcacttgggaaaactggcagtatctaccatgtgtaccctccatcctggcaatgccactcgtaagaatgtacctggcagaagtatgtgcatatggggcaatgatagcacctggcccttgggttgctgtgagcaaaaagagaatattcctgccctatcccagcagacttttcccagcagcatagtatagaattgctataaactgggacctatccaagaatccatcagcagaaggatgcatcaatggaccatggcgccttcatacagtgggttactgtaggcatgctgtatttcaaattaaacatttctgaaaatgacttggatttgggaggagtgagatgtgctaagctctcctgtgcccccagaagctgcaggagagacatgatataagagaatggccagccgggtggtgtcagcatggttgccctccctcaaggggccccacgggaatctccatgtaatctccatcccttgccttcccagcctcggggctgctggccgtctgcaatgttccttggcttccagccacatccctccactctctgttccatcttcacatacccttctcctctgcatgcctttgggtctcctctctagctgcctgtctcttacaaggacacatgtgcttgcatttagggtaagcttggaaattccacgatgagctcctgctttcagcatccctcacttaaatcccagtgtttgctgtaaaatgtaacagtcataagttctgcgcgctgggaagcaaatagatctttgggggttgctttttttccccatttgtctgctgaccacatctagaatataataacttgacatctcagggcaggaatattctcttttgaagctcacagcaacccaaggacaaggtgctatcattgccccattttatagcactgcgcagagaggggaggcggggacagagcagtgacatgaacctgatgttcacaatgagaataagacaaatgtttagaggctcctgtagtccactttctggcttcccctcatctacttttgtaatcaaacaccacggactgggcattggtggctgcaagtgtagacaatggaggctaacaggcctgggcttagagctgcctcaatttcctcatcatgtcaatctcacagcagggacagcctgagcatgaaaggaaacaacatatgaagatacttagctcagggttagcaaatagtaagcttcccattgatgatagatatgatcgttctttttgtttaattgaacaaatgtttcccagtccctccagcatgctaagccctgggtggtagtcacagtttgcagagagagctgtcagcatctcctggctactgggactagctggagtgataatagtattcagggcaaatgtcagttgttcctcattcgcacccctccttcattcctgcttgccacaaggatctatccttaacagtccatgttaaatgttggcataaagaaggtgctatcggttgggcatggtggttcatgcctgtaagggaggccaagtcaggtggatcgcctgaggtcaggagttcaagaccagcttggccaacacgttgaaactccatctctactaaaaatacaaaagtagccgggcgtggtggcacatgcctctaatcccagctacttaggaggctgaggcaggagaatcacttgaaaccgggaggcggaggttgtagtgagccaagatcgcgccattgcactccagcctgggcgacaagaacaaaactccttctcaagaaaaaaagaagatgctagcatccttgcctctctctttgcaggaattcacagggcaaaaggtacagaaggaaactgtgctccagggtgagacatgtcatcagaaggctgtcatctggaccttggaggaaggacaggtgagtgatgcctcctgtagaagataatgcctgagctgagtcctggaggatgcaaacaccacgtgcttcagcttcaggtgtcaatatctgaaagttggctgaagaaatgtgcacctgtgcctctggggaagatggtggtggaaatcaggaaatatagtagttgaagacagagcaggagacctggactgcagaaggcactgatgatgatgatgatgatgatgatgatgatgatgagcatgatggttgaatggtcaggatcctagtgggaaacccaggacacacccaaggttgactgaagagcttcctgacaggactactcacaacaatggggaaagggactaacagaaaacagcaagggaagataaaacactccagggctatcagcagcagcaacctccatcaccttgtgacctgaagggccagggaaggagcagtaaccagaacccagagagagctgtccagtggaagaggtcatctgataacctttgccaggagaatacagccactgtccatggtggcccagaagagagaaagacaggggaacaaatactctgactgtcctctgatatccatctcttgtagtgctcccaattagccattcccaactagaagtcaaagagtaagagagcctatggatgaagtccacattggtcagcttcctggagtacagagcagggtggaggaagatagaaagtagatttggaggggggcaaacagagaatctatccccgtgatgaagacaatgatgatggtgctggtaacagtgataattgtggtggtggtgatggtgctggtaagaatgatgatggtggtagtggtgacagtggtgtttgtgatggtggcaatgatgatggtggtggtaagagtgataattgtggtggtggtgatggtggtggtaacaatgatgatggtaggtggtggtggtggtggtgatggtggtggtgatggtgggggtgatgataatggtggtgatggtggtggtaacaatgatgatggtggtggtgatgatggaggtggtggtggtggtggtggtagtaaagatggtggtgatgatgactaccatttattgagctcatatagtgccactcagcgttctaagggctctcaaccttcacacgagcccagtaagatagggaggtagagattctcagagatttgggagatctacatacagcctaactgtcagagctggcctctgctcccttggacctccctgaaaacacaggaattggtaaagcccctggtcctggcaatttgtattataattacatttgagtttgtttgtgttccttacccctctgtgagctcctctaggtaagtttagtatctgattattactgtagactagggcttggcagtgtctagcagggtatctgctactcaggaattgctaagccaatgatgattagtgagtgaatgaatgaatgaatgaacgaatgaatgaatgaatgaagagtctgtgacttccagtcctagatagcaaggtacgggctgtacacctgctttctacagagcctggcccaccataggcacttagcaaatgttggagataatccaacacagtggcaccgtgacatttctgttttctctggtgcacgtttcctcacatctaaacatggactgaaagacatccaagcttttcaaagctatgtggtttcctgaaatttccacaagcccaaactctgagctaaaagtgaggatgtttgtcctgtgtctcaatgctgcacatggaaactcacagcccaacatagctcagaattgctaatcaccttgggattgttgtgttaataagtgaaaatacagaaacacaaacctgtcttcctgttaatgttaattttggtcccaaaaaatgttgctaaaacatattgacgggcatgtcacagatgttccttctttcatacatgcgagatgctgaatgtgagagctggacgctttgacaggatttctgttgcttttatgataaccgccatcaggccatcttcctaccactggggcccggccctttatctggccattctcctgtgcagaggctcacgctggggcaggcatgtaattctgtatctactaccacaacctgcacaatagactgataaaggtaagcagcttgaaaaaagatgagcgatgtcaccatcttgtcaactcacctgctaatttcagtatatgcagaacatctgtaacagcctgcttggtggaggactaagttgaatctcaggttgttcattcccagagctcattagggggagagatgacacaatggcagggcaggtggctctccagtttgacaccaaggtttttaactcatctgggtagcagagatttagatccacttaccagtttttgaagaatcaagcagaacagcaccaacttccctcatcttgcagtggccatgtttaagcataagaaggtgtctcatgatttagcgtgattaccaaagaggaaacccatccagaatcttctggcttcatggccttttccttaccatgcaggaagcagattggcagggacctcagcaaaggggcagggtaggttctggtaatattttaggcctggtaatattaccaggggtcatgttatctgttttggaagatgtaccatctgagcagagagaagaagggttttctccatgtctaaggggtttcttttagaatccctctgcagtagcagtgctctgtggctgggtcagaggagagagagaaccaccgtagtggcttggggagggagaacggagacagtggggcattaaggagctagacttatgccagctaccaggaagaggctctatgctaagcagaaagcatgggcatccccctccagacccacaccagcagaatttgtgttttgttggtgtgcccacaggctgacagaagaaatgcaacaaggaagaaaaatgcaatgaggaagtgaaggtacagtcccaggccaggggacttggaaagtggccttctgcttttttttgttgttgctggacattttttctttttgcaatattttcagccaatttcatcaaatgaaaaattgccacctcgttgtggatgctttattctggctaattagcactgatgaggaatcctgggtcaagctaaggacacagctacatgcaggactccaaagagaagccagaaggaactggagtcctggccagatcctctagagtccgtgctcctgcaggcatctccactgcaggtgaatgcagtgtctgtcatccccactgcaaaccatgattgttcccatatggattgaggcatcctgagagccgcatgctctacatagagataaagtaatttttactattcctccaatgtggaataggaacttggagagtgagctccatcagtctctgcccagatttggagaaagaacccagatagaaccaccttttccagaggcattgagagcaggttcaagctggggaaacatcttcccaaataaacatttctgtaccgatgctgtgaatccagcaaaaacgaagagtgcatggaattgttggccagatgcaatctcagagagctcttgttccagggagaaatgaatccctcagacaataatcctcagctcctcctagctgcgcccagctgaagtctgcctaggggatagtggaaggcactgtttcactccacagttttggaaatgtgcatgcaacatttctaggtcacaccaaaatgcacagcccgtgatgaaaaatccaaatcctaggcaggtctgaggaccgaccctaaactcccaacccaacccaagaacctcattccaagtgcttctaaggaaagcagagagtcaaatagaatccctcaaaggaaaggagaagctagctggtgtttcttgcaatgtcagacacgcctcaactttccctttagaatggctttcctttgcagatagaagtgtattgctttaacccatacaacacgtgtccaatgtgttaaaagaagataagtttcttagacaaaaaaatacatatgtaagactctaattcacagaggacaagtaaagtgagactcatgggccctaaaataggtattgtgatgtttaattttatgtgctaatttgacaaggccacagtacacaggtaactggtcacacacatctggatattgctgtgaaggtattttttagatgagactaacatttaaatcattagatttagagtcaaacaggtaaatctccataatgtgggtgggcctcatctaatcagttgaaggccttaagaaaaagagagattttgcccaaggaaaggggaattctgctagtagattgcctttggatctgaactacaacatcaacccttccctgagtctccagcctaccagcctgccctgcagatttaggacctgacagcctctacaatcatgtgagccaattctatgagattctctctctctctctctctctctctctctctctctctctctctctctctttctctctctctctccatccttagaggacaaaaagaaattagcctttgccagtgtaggtgctgtcataatgacactgattcaacacatgccttttccctgcaaagcctgaaggcagggtgcctcgacacccggcttaggtcttctcattttcatgaaagatatgttgcatgaaaaatggcattctgaggctcgtcttgctctgagtgaagactactctgagaatcagaaaacgaaacactagccagacatggcaaaaaacaaacaaacaaaaaatcttaattgctcgaattgccactgaaaccaaccttccagagaattgcctgactctaaaattggaaggccacagaaaggcagcaagcaggttgggaaccaggtgtgttagggggttttctttcctgcatttcattgttttaaaggcgtcttgatccatgggttgcaatatggctcaacctgtaaggagggagaggtgagaggtcagccaccctctgctgtagggagctgatgtttccacctcttacatttcgatgagcaagacattttgcttcttcatcccccaaaaggaagaggtgaacaggcgctggagtgttttgactgaagagtctttggtgttccctttctaataaagggccatatattagtgccgaacagtcatttttttgagcactaaagtaataccagtactctcattgctcaagaaattgctgagcaaaatcttccaacaatgtgtctccccggcattccttaaccctattgataatgataaagtctcataaatctaggtaaatctttaattacgccttcagaacgtgacgatattatgaccgtgatatagtcataaagggcacattcaaaattagctcggtatacattttatgaatatgtaaaagggtagaggtggtgagagttcaaaagcaaagaccaaaaaaggatgtattttttcttttttgttgcaatcatctgttaagacgggatcttattttcttttttaagataattgtaggaaaaagctctctttcttgtcttgtatagtttttattaaaatccaaagcaccaactttgtgaagagccctatttcatgttacaaaaactgcgagattaaatagagggagtattttcttctgtgttgaaacaccttttggcctaaaaattgttcgtccttgtattaaatgtgtgtgaaacatttatggagagaggcatttctttgcactgttttactgaggccgtaacaaagcttagagtttgtttcatactctacaatcagggtgattacagcctcatctgtctcccacccctgcatttggttagtagccctatgcaatttatttttatcttcagccaatgcatatatttttacttgtgtgaataataggggaaagattaagttcttttattttgctaattaaactgcatttttctaaatctcatgaggtagtaagtgacagaattaacaggagcactttgcagagttttgctattttcctgattagattagaggtatttgatattgaagtcagagctgatgaagtggtttcctcgatgtgaatgaatgcatgaccctagtttatcaccgcggcttcataaagaagtcttccttactgtcaagaaagcccaaccaagagtgaaaatgacattagcaaaaagctaagcaaaaggtcagcagagcagaatgagaagggagaaggaaaaaatgcattcctctgcctctttatttttccccccaaggggttaaggaagattgctcagttacaacctctgtgctgagcagagcagggtgagcctcagaactgtaccctcctgagacagggacacctttctcagcctctagagtttgaaggtaaaaattttatgttaaaaaaacaaacaaggaaacaacaacaaaaaaaaaaacacaaggggaatagaaatgcagagcgaggaaagctccagctctcccttcccttccgccagtggccgccatgcagacttattcccataagcatctccagactcctttgggctatcctgggcctcctccggagctgggcttaaagctcttcttcaaggcagccaggggccaactgaaggcaataagcaaaggcaacttctccctcgcttcctcacaccttcccttcctcacaccttcaagctccccaaccccagcttcctagccccttaggggagggaagtaaaatgaaggagtgatgtcagacaaaccagaggggaagatcagaataggggtgtgctttgccaaatcctctatggtgaacagaggaaagacattgcggcagggatgaggaggagcctgcagagggagctcagtggagtctggaccatgcccaggactgggcatctttcaatggtaagtccaggcaaggccattgtgtgtctatttgttacatgattatccccttcttctcttaatccctaatcttgtcttccccagagacacattattttctttttaatcaaggtataatttgcatatagcaaaagacacataagtgtagagacagatgagttttggcacatgcacagccacgtgcaattcacattcctattagaatataggatgtttccatcaccccaggaagttccatcattatccttcccagtcagtgcctgccttcccacccatccaagcaatcactgttctggtttccatttctaactataaattagatttttcctgttctagaattttatagaaatggaattctacagaatgaactcttttgtatctggcttctctcacccaccacaatgtttctgtggctctctgttgcgcataaccataggccactcatttctactgctgatttgcattctgttatgtgattctaccacaatcttttcatctgttcttttaacgaatgttggggttccttccggtttttacccattatgaatcaagtcgcggtgaccgttcttgtacaagtcttttgcagacatatattttgattcctcttgagtaagtgtgtaggagtggaattgctgggctctagggtaaagagtatatttaattctatgagaaactactgagatggtttggctatgtccccacccgaatctcatcatgagttgtagttcccataatccccatgtgtcacgggaaggacctggtggaaggtaatagaatcatggggggcggttaccctcatgctgttctcatgatactgagtgagttctcacaagatctgaatggttttataagaggcttttcccccttttgctcagcacttcttgccactgcaatgtgaagaaggacatgtttgcttccctttcccccttctgtcatgattgtcaagttttctggggcctcccaagccatgctgaactgtgagtcaattaaacctcttttcttgataaattacctagtcttgaatatgtctttattagcagtgtgagaaagaactagtcaactatcaaactgtttttcaatttggtttcaccatttttcatttagccaacaatgtaagagagctctgcaacctgtttattccatatcttcaccaacatttagcattgatagtcttttaaattttaagtatttcagtgattctgtatagctttccaaatatggttttaattttcatcctccttctgatcactttttatatgctttttatatgtcattcaaatatctttgtgaagtatttgttcacacgttttgcctatttttaatggagttctcttattcttactgagttgtatgaattccttatatattctgaagaccagtccttttccaaatgtgtatattacaaaatcttttttcttcatctttagttgccaactaatatattttattcttttattaacatgcagtaaattgagttcttttggggtacacttctcttacttttaacacatgtagagattcatataaccaccattacaatcaggacacagagcatttgtgtcaccccaaatgactctaacctttgtgggcacatgctccccacccataacccctgggaactagtgatctgttctctatcaccatattatagtttttttaaaaaataaataaacagaacaccatataaatggaatcacaccatatgtaaccttttgaggttgacttctttcactcagcatctctgagatttttccaagctgctgtatgtatcagtagttcattgatttttattgctgagcagaattgcattgtaccaattcacgtttaatcgtgtttttttttttaataagcagaagcttttaatttggaccaagtccaatttatcagttttctctgttatggtttgcagtttttttcattacatataacacatttggccactgaaaggtagtcaaataatatattctcctgtgtttatttataagacctttatatatagttttagcttttacacttaggtctataatctatcataaattaatttttgcatttagtgttaggtagggtttagtttttattttttcagtatgggtatatctgttttttaaagcatcatttgctgcaagactgcccttttctcattgaattgccttgcagcttttgccaaaaatcagttgtgtgaatttatttctggcctctgtattctgttcacttaatctatttgtctgtttcacaccaatgcaaactgtcttgataactttagtttcacaggcagtcttaaaatcaggtagtgtaagttatttaactttgttctctttaatattgctttggttattctaaatcctctagatttccataaaaatttaagattcagcttgtcaaagagaagtctgctggaatttctatttggatagcagtgagttaaatttcggagatagaatattacagcaacattgaatttcaatccatgaacatggtatatatctcttcatttatttaggtcttctttaatttttcttggtgcattttgtacttttcagtatagaagccatacatatattttcttaagtatttttattttattttatatagtattttaaatttttattttctaacttttttgctagtatataaaaatgcaaatgattttccagaattgatcttatctctagtaactttgctaaattcacttatttctgactatttacagattcttttggattttctacatgtacaattctacatgtataaataattatagttttatttcttcctttccaaacccgatgaattttatatatttttctgcctattgtactggctaaaccctccagtacagtttagcatggatgtgatgaaagtgaatttttattgcttgtttttgatattaggggaactctatcagattgagaaatgttccttctagtcttctttcacaaaaaagtttttttatgaataagtgttgaaaattagcaaatgctttttctgcatttattaagttcatcatatggttttttccttctttcattctggtaattctggtgaattagattaattttttaatgttaaaacaatctgatgttccattaataatccatttagtcatgatgtattatccatttttatgtatattttgttaagaatgtttgcatttaagttcatgagaaatactggcttgtaattttcttttattttaatgttcttgtttggttatttattagcattgagctaggttcatcaaaacaggggtgatgtgttcctttcttctctattttctgaaacagtttgtgaaaaattcgtattttttgaaatttgatagaattcaaaagtgatctaatatatgagtgcttttgataggaagagtgtgataacaaatttaatttatttaacagatacatagctaatcagtttttatgttctgtgtgttaattttggtaatttttatctttcaatgtatttttcaactttaagttgttaaatattagatataaagttgttcatagcattcccttatttatacttttaatgtctgatttatttctagtgatcatcctttttattaccaaccctggaaatttgtgtttcccctcttctgtttttaattaacatagttagtaattcatcaattttcttaatcttttaaagcaaacaacttcttgttttatttattatcttcaatgtttgttcaatttctgttcactgttgcccttctactttcatgggttttatttacttagtttttttcttatatttttaagtttagtgcattgaattttggcactttattttctaatataaacttttaaggcaatacattttcctctaagcattgctttggctgcatcccctaaaatttaataggttgtattttcattgtcaattatttttaaatatttctcatttcccatggtgattttttccttttgatgagtaggttatttagaagtatgtgatttattcccagatatatgaggattttccaaatgtatttgtcattttttttttccaattttaatttcatattgtcagagaaaaaactctgttttaaatcttttgaaatatatagagatgtgtattttagtaccactagttctatcttggtgaatgttccagatgcactaaaaaaaatgtgtattataaagttgttgggtgtcacattctgtaaatgtcaactaggccaagttggttaatattgttcttaaaatctacttactctatcaattactgaggaagaagtattggaatctccagccataactgtgaatttatctatttctctttttagttccttaagtttctcctttgtgtttggaaacgttgttgttgtgtcaagatattgttagtattgctattcttctttttaaattacccatttatcatcaaaaaatgaccttcttaatacaagtaatagccttttctctaaatctctgtgtctaatattaatagagccatgctagatttcttatgcttacagtaagcatagtataaaggaagagtgtttttcttgaagtagcatatagttacattttgctctgttaccaagtctcactatctatgccttttaattggattaaagtttgggaaagcttaaatggctggaacttaaaagacaggtcattaaagaggaacttcacagggaagtaacccaagcaatctacgtagatgttccctggagtttttggcagaattctaagacaggcatgcacatggtatcactttacaagaccttggaggggggaaagaaagctacaagacagaatgtgaactgaatgacaattccagaggatatatagcactgggagtcataggagatttattcagccaggacagagaaacccctctaaatattccaggaattcagttgagaccccatacaggccacatcttcaaagcagtatatttcaatctcggaaaaggaacaacttctctcccactctaacaaagcctaaaaacaaatcctaacatgatcaaactgatttcccaataattatctataaataaaactcaacactctttagaccaagatggcaaaatatattctcaactatgtagcattcataatattcagcacacagttaaaaaaatcactagatatgcaaagaaagaatattttacctttatccagaaaaataaataaataaaacttttctgtagaaatcgactctgaaatgacacagttattgaacttaggacacaaggactttatagaagccattataaatatgttcaaggatttaaaataaatgtttaatataatgagtgaatgagtgggaaatctcagccaagtaataaaagctatttaaaaaaaataaataaaaattctagaataaaaaaaatgtaatctgaaatgaaaatttcactggatgcaattaatagcatattgaacaatgtggtagaaggccagtaaatttgaagatagatcagtagaaactatcccacctgaagcagtaagaaagaaaataccaataaattagtagagactcagagacctaagtaattcaatcaaatggtttaactgggatgtcagaaagtgaggaaaattgggagagaacaaattatttggaaaaaaatgactaaaatattgctgaactttatgaacaatatcaacacggttgacactgaaactcaacaaatcataaacaggagaaacataaagatatatgtagacacattacagccaaattgctaaaaatatttttaacacaaaaaaaatcataaaagcagccatagataaaaatcatttaacatacaagaaaaaagcaatatgagtactgctaatttctagtcggaaacaatgcaagttataacacaatggaatgccatattttaaatactgaagtaaaaataagtcaacctagaatcctatgtccagtaaaactatccttgaaaaatgtggtcaaaatgaagacattttcatcaggcttcccttttgcccccaaagtaattggctgaagggaaataacagcagatgtacacttagtccacatgacagaaggaagagagggaaaaaaatgtcaatataaaagacatttttaatttcagcactttggcaggctgaggtgggaggttcacttgtggccaggattttgagagcagactgggcaacatagtgagaccccatccctagaaaaagttaaaaaaaattagccgggcatggtggcacgtggctgtagtcccagctatttgggaggctgaggtgggaggattgcttgagcccaggaatctgaggctactgtgagccatgatcgcaccactgcactccagcctgggagactgcaccccagcctgggtgaccctgcctcaaaaagataaattttatttaaaaaatacatttttcttcttttgtatcttctttataagatatctgactgcttacactgaaatgataacaatttattgggcatataacatataaagtaagatacacaacaataatataatggagatgtggatagaaatgtactattggaatgttcttcattatacatgaagtacatggttttagttcatggagcactgaaacaagttgagaatacataatataattcctagatcagcttctaaaataataacccaaagaagcatggctaaaaagaccatggaagaaacaagatgaatattaaatatacacaattaaaccaaagaagacaggaaataagaaaaaggggaacaaaaagcagaaggcacatttagaagaagaataacaacttaataaaagtggccttttgggggtttcaaccacatgcctgtgatgtttattaagaaccaattactcttgggcagaaactgagtaaatggagatctcacctccaatgtatgaaaacagatgctttgtaaatttcttccagttttatagctgtttatagtgggagagtaagtctaataccctatactctgtcaaggtcagacctggacattagtgcatgatttgcacttaatagatgtctttgctaatcctctttcactatgtttacttatattttatttctggaaaaatatagcactttggccctttaagttctgttagtattgtagtatatttctcaatgtatttcttatttttatcatccaacattgttttggggccaactttatttctttgcattacagtgtaatattccaccacctatgtaaactgcactccacttatcctttttacttgctcattagatgccaagcaactcttatgttgacgcaaacaacactgcagaggaaatcgtgaaatatatccctggggtatataaagttgcacactttctttaattggatttaatcggttaacatgacagtttttaggatgactcctttttgatgaaaacagtagagaaagtgtaaaccaaagccagggagatgcgtggagaaggtgattagtgggagaagcctttgctgtatgtctgtccactactatcacaatcttccaatgatgcaataggtacctacaggggcctcccctaaaatcagagcccatctgcgaccctggtttttcccagtgcctgtgtggcacagggaggcctcatgttgctgatgaaagggagacgtgtgaaagagaaaggatcttctcttgtcattgctaagcctgctctgccttttttttctgagcattttttcatgactccaagtctgtaccagactttcccatacatatgacgcgacatatctggcctctgtggctccagtctgaaattttctttcactcaagaatcctttaaactatttcagtcatattttgcaggaagcagtctctgtcagtaacaaatatccaactccatcacctccacactcttattctccttggagaaggaagccctctgtggccatgtccccagatgcccactggatggtggctgtcttgatggatgagggaacaatctcaaaagacttgaatgccacagccagtagcacttaccaaatgccaggcatgttccaagcaggtccatgaattatgctgggtagacaacgtggcacctaattacctgtgtcgcgatcctgcatgttatacttactagttgtgtgagcctgagcaagctgcttaacctctttgtgcctcactcttctcataggtaacattgtgagaatcatctttatcccttagggtttttccaggacagtgcgagcctttgtaaaggacttaaaatctgtaaagcacacagtcacatacattatgatgtggataactggagaaatgcattattttctttggaaaggagaacaaatactgttatcataatgtatttttgttaatttttttggctggaaaattggcaatgcaattttaaggttagcttaaattcactggtaagaattagtagaaattttttagaaaaatagtaatgttttctggttcaatgaggagcttgctagttgctactctatcttaacaacatgtaaaaagctgaacaaactggaaaataaacagctcttcttagatcccaaagggaagtgagttcacaggacaaatcaccgaccccaaaattagagacagataagcaaatacagagaatcacaacttactagatagaaattcatgagcagaacttctgaaggaatcagcgccaaagtcgggaaatctgaactgtaattgatgacttattggagtctcagtgtggataaacctgagagttaaaaactctaggtggactagtcattgggtatccctcacaattaagtgagttttaccccctggagctggaccaggttcccacactgaatactggagaaaaatcccctcatgcttctggcagaaggaggtgaaaaacatctaagagtgcatcagagcattctgttcttcttaacaaggtctgcccttaggagaaactattcaaccagagcctaacctgctagggttttatcagaacttatctcacctggaagaaaggaaatacccaactccacaccattgcagccatcctgtcccatctaagtggcagtggggtggggagattgagaagcacttgagaagttcacagtccagaagcagaggctcattagaagactgagacccaatcacaggtctagagaatgcaccccttctccctgcaccttactaccactttactaaaggcctatttacagcatttctttttatccagtacatattgaccagctatcaagagaaaagtacaaggcatactaaaaagcaaaacagtgcagattgaagagacacagcgagtgtcaaaaggagactcagatatgacagaaatgttggaatgatcagatcaggaattgaaaacaactatgattaatatgctaagagctctaatgtataaagtggacaccatgcaagaacagacaggcaatgtaagcagggagatggaaattctaagaaaaaagaaacaaaaagaaatgctggagataaaaaacactataatagaaatgaatcacgcctttgatgggcttgtagtaaattggacatggctgaagaaagaatctctgagcttcaaaggtatctcaatagaaacctccaaaattgaaaagcagggagaaaaagaaaaaaatgggggggaagcagagaataatatctgagaactataggacaaatataaaaggtataacatacacatatgggaataccagacagagaaaagaggagaaaggtacagaagaaatatttaaaacaataatgccccaaaatttcctctcaaattaatgtcacacaccaaccacagatctaggaagctcagagaacaccaatcaggaaaaatgttaaagaaattacacctaggcatataattcaaaatacagaaaatcaaacataaagaaaaataattccccaaagaagccatagggaaaaacaccttacctatagagaagcaaaaataagaattatctctgacttctcctcttaaactatgccagcaagaagagagtggactgaaatatttaaagtgttaagagaaaaagaaacatcttaaaattctgtaccctgcaaaattgcttttcaaaagtgaaggagaaatagactttttatacaaaccaaaatgtagggattcttttatttatttatttatttatttttgccagcagacctgccttgcaagaaatgttaaaagaagtgctttagagagcagggaaattctataggtcagacacttggatctacataaaaaaaggaagaaaccaaaggagaaataagtgaaggtaaagtaaaaattttatttttcttacaacaaatacatttattcaaaataaaaatagcaaaaatgtatttgattatgtatgtgtttttgtatacatgcatacataatcaatatagtcatgtgtatacagacacatataatcaatatagttatgtgtctcttaacaatgaggatactttttgagaaatgagtcagtaggtgattttgtcattgtgtgaacatcatagtgtgtacttatacaaatctagatagtatagcctactgtacacctaggctatttattatagcttattgcttctaacctacaattctgtacagcaatacagtattataatattatggttgaccaaaacataaggcatgacattgtgtgtgtatgtgtgtgtgtgtatgtatacatgtatatatttatatgaaataaatgaaaacaatgacataagggacgggaaggaagaattaggagtattttgttattaaagtattcacattatccatgaagcagtatagcagtatagttacactacagttattatagttatttaaaagtggacttggattagttgtaaagatatattgcaaactctatggcaaaaactataaaaagaaaaagaaatataactgatacactaagaaaagagggaaaatgaacttatataagtttttcagttaaaatcacaaatggcataaaaagactgggagataacaagaacaaagggaaagagcaatgattggtaaacagcaatgaattttgcagacattaattaaactacattaataatcactttgaatgccaatggttaaaatattctcattaaaacagacacattgccagagtggatcaaaaaatgaaatccaactataggttttctagcagaaacccactttaaatacaaagacacatctagattaaaagtaaatggatggagaaagacataccatgctaacactaatcaaaagaaagtgggagtagctatattaatttcagatagagcaaataagctatcaggaataaagaatggcattgcataatgatgaaggagtcaattctccaagaaggcataacaatccttagtaaagttgtgcctaacagtgcatcaaaatatatgagctaaaaatgggtagaactgaaaagaagaaaaaatgaatccaatattatacttagagacttcaacactcttctatcatgaacgaacagacctagcaaacagaaaattagtaagaacacagttgagctcaacaccaccatcaatcaactgtatataattaatatctatagacagcttcatttagcaacctcaggatatacattcttctcaagctcatatggaaaattaaccaagatagaccacattctgggccataaaatacaccttagcaaattaaagaaaatagaaatcacacattgtctgctctcagaccacaatgcaattaaactacaaatcaataggaagataggtggaaagcccccaaatacttggagattaaacaatacacttcacaataacacatggtcaaaaaataaatatcaagagaaatttaaaaatattttgagataaatgaaaatgaaaacacaacttataaaatttgtgagatgcagcaaaagcagtgcttacaggggaatttatatcattaaatgcatatattagaattagaaaaaaagaaagaaccaaaattaatcatctaggcttccattagagaaaattagaaaaagaagaacaaattaagtctggaataaggagaagaaaaaaatgaaaattagaagagaaatcaatgaaattgaactcaagaaaaaaaaaatagagaaaatttatgaaaccaaaagtatgtttttagaaaatataagtaaaattaaaaaccggtgccccagctaaccaaggaaagacaagacacaaattactaatattagaaatgaaagggggcatcactatcaatcccatggacattcaaagcataataaagaatgattataagcaatctatgtccacaaattggtaacttagattaagaacctattatttgaaagataaaatgtactaaaactcatataaggagaaattgacaattttaataggcttatatttattagcaaaattgaatcaatatttaataattaaaaacagaaagcaccagctctagatggctttactggtgaattctatcaaatatttaagagaaaaataataccaattctgtagactctgtttcaaaagtagaagcccaggaaatattgtctaactcattctgagcagcccgcattacatttatactaaaaccagacaaaaagacatgacaataaaagtaaactacaaaccaaaattctcatggacatagatgcaaaaatcctcagcaaattattaaaaaattgaatccaataatgtgtgaaaataagtatggaccacagctgactgggatttatccctggtatgcaaaaacagttcaatatttgaaaatcaattactgtaatctaccacatcagcaagctaaagaataaaactcacaagaccatatcaatagatgcatacaaagcatttgatcaaatctaacatcacttatgataaaaactatcagtaaaccagaaatagagggaaacctcataaagaatattcacgaaaactgacagctaatgtcatagttaatggagagaaactcaaagctttcccactaagattaggaacaaagcaagaatgttgcctctcaccattattttcaacatcatactggaagtcctacctgatgcaataagacaagaaaaggaaataaaatatataaatgatgggaaggaggaaatgaaattgtctttttcacagtgacatgattgcctatctagaaaataaaaagaagaaaagtactcctgatactaataaataattataccaaggttgcaggataaaggttaatacacaaaagtctattgcttttctaggcagcagcaatgaacaagtagaatttgaaaataaaaacaaaataccgtttatattaataccccccaaaatgaaatacatagatataataaatctaacaaaatatgtacaaaatctatatgaagaaaactataaaactatgttaaactaaatcaaggaaggactaaataaagaggtattcatattcatggatagaaagatttaatattgtgaagatttcacctattcccaacttgatctatagactcagcacaatcctaatcaaaatcccagaaggttattttgtagatattgactaactgattctccgatttacagggagaggtaaaaggcccacaatagccaacataatattgaaaaagaagaacaaagttgtgtcactgacttctagacttactgtaaaactacaataatcaagatgatgtggtatcgtcaaaaaatagacaaggcagtggaacagaataaaaaccccagaaatagacctataagaatatagtcagggccacgcacggtgactcacagctgtaatcccagcactttgggaagccgaggcaggcggatcacaaggtcaaaagatggagaccatcctggccaacatgctgaaacctcatctctactaaaaatacaaaaattagctgggcatcgtggcgggcgcctgtagtcccagctactcaggaggctgacgcaggagaatcgcttgaacctgggaggtggaggttgcagtgagccaagattgcaccactgcactccagcctgatgacagagcgagactccgccaaaaaaaaaaaaaaaaaaaaaagaaaagaaaaaacatagtccgatggtctttgataaagtaccaaagaccataaaatagtaataaataatcttttcacaaatgatgccaagacaacagaacatccacatgaccaaaaaataaaataaaataaaataaaatctagacacagatcttacattcttcccccaaatgaatttgaaaccactaaactcttagaagataccacaggagaaaatcgaaatgacctagggtttgatggtaaccctttagatataatgtcaaagggatgatccatgaaagaactaattgataagctggacttcactaaaattaaaattttctgttttgcgaaagacagtgtcaagagaattaaatgacaactcacaggctggaagaaaatatttgcaaaagacatatctgatagaggattgttatccaaaataaacaaagaactcttaaaactcaatgaaagaaaacaatgatccagctgaaaaaaatgcgccaaagaccttaacagacacctcaccaaagaagatatacagatagcaaacagtctataaaaaggtgctctgttccatatgtcattagggaaatgcaaattggagcagcaattacatacctctatatacctattcgaatggctaaaatgggtaacactgacaacaccaaatgctggtaagaacatgaagcaacagaaactctcactcattgctggtgggaatgcaaaatgaaacagccaatttggaagatagtttgggattttcttacaaaactaaacacactcttaccataccatcctgcaatctcactccttggtatttacctaaaggactcaaaaacttatgtctgaaaaaaaaaacctgcacatggatatgtatagcagctttattaataattgccaaaacttaaaagcaaccaatatgttcttgagtaggtgaatggataaataaactaaaagtctggtacatcttgactttggaatatcattcaaggctaaaaagaaatgagctactaagccataaaaagatacatagaaaacttaaatgcatatcattaagtaaaataagccaatctgataaggctacctactgtgtaatttcaactctgacattctggaaaaggcaaaatgatggagacagtaaaaagatcagtagtgtccagtggaggaatggaggggaggcaggcgaacagacgaagcacaaaggatatttaggggagtgaaacaattctgcacaatactacgatgttgcatactcattaggcatttccctaaatctatagaacacgcaataccaagagtgaaccctcatgtaaaatatggactctgggtggtgacgatgtgttaatgtaggtttatcaattgtaacaaatgcatgcaccaccacagtgtgggctgttggtaatgggaggctgtgcatgtgtgtgggaaggggggtgcatgggaaatctctgtgccttctgctcaattgtctgtgaatccaaaactactctgaaaaatgaagtttattttgaaaaaaaaagaataatgatgaagtgggctttcaaataccacatattaaactgtactttaaagcaagtataattaaagcagtgtggtgtcaggggaaaaaaatgtagacaaatcagttaaaaagaagaaaatctcgaaaggatcccaacattgtgacagtgtcgtgataggtgcctattgaatatttatgtaataaatgaatacagcttagtacaacgttaaaagtatcatttcaagacagtaggtaacagaaaattactctacaggtaggtctggggcaaattgtaatcatttgatttttaataatggttaaattattctctcaccctgtactatcgcccaaatacacacacacatacacagatggatgagaaagttataaaatgacttaaaaatatcaatctcttcgtgttgattaaatgttcatgttaaatctaaaaacaaagggagccatcaaaatcaaaaagagaaaaagcttaaaagatttgtctacataaaaataaatacataatgaatgtcatattgctaaaaaaaattcactatgtttgacaagttgattttcttgataagtcatagaatttaatatggaaatatcaatgattttggggaaaaaaactgactaaaggaataaataagccacactacaaagaagcagtctacgtggccatggcatcacagcttatgtctaatcccctttgactagagtgcaggagtgtgtgattaaactgagcaggaactaatgtgggcttcacgagtggccgccactgtattcattcaactgctgggtggaagagcggcttccctcttccttcctcagaagaccagagatgatgatttaagaaataaaagttggaaatgtcttatttcaagtcagattacaatattaaatgttagaaagcactgagatccagtttttaatggaaatatcatctattgccattatttgccaaattaaaaacccataaaaagtcatggctgggcgcagtggctcatgcctgtaatcccagcactttgggaggcccaggtgggtggatcacctgaggatgggagtttgagaccagcctaaccaacgtggcagaaccccatctctactaaaaatataaaaattagctgagcgtgctggcggtgcctgtaatcccagctactcgggagactgaggcaggagaatcgcttgaattctggaggcggaggttgcagtgagctgagatcgtgccattgcactctggcctgggcaacagagcgagactctgtctaaaaataaaaaaaaaagtcatgatctttgagaaaaattagagaaaaagataagctaatgtagaacaatttactaaaataattcacaaaaaaataacaatttagaaatcactaatgacaacaccaaagcatataaaattgtaatttcccaggaaatacatgtagatgtctagatatcgctgtatgtatatgtatatttacatacataatacatatatgtgtatatcaatatatgtatatttctttttttaaatgtgatattccaagctatttgctgttttgtaattttttcaattcatataaccattttctatttaaaaagagttctactcctctgcattttaaatgccaagtaatactccactgtttgtgcagaccataattttttattacccaatcattattgggtagttagatcacttccaattttttatatttgatacaacactgacctgcctgtggttttgctcaacattcatgaacacacatgaaattttccaagggtaaactcttttttaagcccttaatatatgttgccaaattaccttctgaaaccttctacaatagactctcacctgaagtgggagggatatttttaaagtcagtacatataatacaaaatgctggtcatcaaaattgccctggcacatcttttaagaaaatagtgttggagattgacattcagtaattcatttgttcatgcaacaactgaaacactgtttattgagtaactagtctgtgtcaggcatagtgccaggagatggagatgggacagacaccgaactagaccaatatattcactgtaaaaagctattctggtggagagagagaatgaaaattaagcctaacaatcacaaaatttctaaagcattagaagatgataagtaatatagaaaaaaaaaagactaggcagggctaaaagagaagtatgtttggaggagggtgccatagaggtttagatggtcaaaggaagctccattgagaagaggtgacttgaagaaagtgagaattgagctatgcaactagctggtggaagggcattcccagaagaggaaacaccatgtatgaatgccctgagaaggaggcacaattggcatgctgaaggaacaacaaggaggtcggtgtgtccaaagaccagtgtgtggcaggaagagtgaaggataggaggagaccagagaggtgagctaggcagggcattgggtggatatggactttttcccagaaaggaatggaaattgtggagcatgtttagcaaaggcatgacatgagtgacttgttttaaaggatctctctggctgctccttagaaaacagactgtagggcacaaggtgggggtgggtagcaaggagagccatctttgcagttcttatgctaggagctgttaggctttaggggacatctggtatgagaatgggtccttaaacatgagtctcagatccagccctcgggacggtcacaccacacagacccagtgaagaaacagctctggggagaaagcagcaggatctcccctcaggtgctcactcctgagcacacacacagagggaaacgatgggtggtaaggcaggctttaggtacatcttccttccttctgcccttccttccttctttccttttctcttccctttcttcttccctctctcccttcctttctttcttctcccctctcttctctccttccttccttcttccctcctgtattagcctgttttcacactgctacaaagagcttcccaagactgggtaatttataaaggaaagaggcttagtggactcacagttccgcatggctggagagacctcaggaaacttaaatcatggcggaaggtgaaggggaagcaaacaccttcacatggctgcaagagagcgaagtgcaagcaggggaaatgccagatgctcacaaaaccgtcagatctcctgagaattcactatcacaagaaaagcatgggggaaactgcccccatgatccaatcacctccttccctccacatgtggagattacaatttgagatgagatttgggtggggacacagagcaaaaccatatcatctccctttcttccttccttcttcaatcccttccttccttctttcctctcttcttctcttgctccctctcttccttccttttttctttcctcccttcctccctctctccttttctttctttccctttcctccttccctcccgtccttcctctcttcttctttctttcccttcccttccttccttggtacctccattcctccttccctacctccctctctccttctttctttcccctttttgggggaggggtgtggtggacaaatgcagagttaaaattatgtaaattaaatttgtcaaatatatcactccactgtagcaaatttcattactgcttgtacctccttacacttaccccagccatgagtagaatgttgttgttattgttgttttaatctttagatgtgtgtagacagaatgttaagttactgacaatgctataggcattgctttgtttgctagtgcaaaggatcattttttcccagcttcttggctgtccatgtttccgtcctgagttgtctttcctgcactttgcaggcatggaaaccttgttccacacattgcctggtgccctgtccagcgctgcaaggtgcactgcgtctcctctgcccagcaagccacaagcccctccagggtgagaggagagccttcccttcccttggtcctcccttcgacacagggagctggagctggacagccccataggcactcagtaagcacacaccatgtagataagttaacatgtacctttgaaaaggtggatcacggggattttgtaatgatgcagcagcgaggatgctttgaggatggaacttggggtctttcaagttctcagtagggctgcgatccttcctggactctagttgtatcctgcagaggtgtaggagatgagccagtgaggtgccattctggagaggttccttgtcggctgttcatgaacacaattgctctttcacagctatcagtccctgagcagccacccttcaccaggtttggggccaagtgccttacacttgttaccttatgcaattctcaccctaagcctgcgataccacaatttttataatttatcatctacaggtgtgaaaaccaaggtggaacattttagggactctcagctagtaagtggaggcttcctttcctgccccttttttattccattatggacagagctgactgtatctctgcattcactgcaagtctgcgttgctccctcaatctttgatccacttctttctcctgaagggcactgaaatactggccgtttatggctcctgaaacttgggatgggaggacccagagagctcttttcaccaagagtgtgacctcagcagctttcattccttcctggccccagctggctctgggctgagcccgcttcaccagggagcaccatgtgaagatgagtctcaacctggagtctgccatttgtttccagtccttcactgccattccaaagagaggaatgactgcccgaccctccatctggggcagactcagcccaaaacagaggctgttggcccctttccccacctctcagctccttagcactttgaatccaatcctactctttggaacttagctgataaatacaaggctgccttttccaaaaatgtttctgaatagacaaactagaaactttataatttggaaatagtattcaaatggctctaaagacacatctagggctatgttctattcttggggaaattctagagatacatggttggctggatggagggatgaatgagtgggtggatgagtaggtgtgagtggatgaatagatgggtggatggatgcatgcatagatgaatggatggatgaattgatgggtgagtggaagataaatgaatagatggatgggtgaaatggatggatggatggatggatggatggatggatggatggatggatggatggataaatgaatggatggatgtgtgaatggataaatggatagatcgatgagtggacagatgaatggatgactggatgaatgaataaatgggtggatgattggatggattaatggacaagtgggtggattaatggatggatggatggatacgtagatggatggatgggtgaatagatgggtgggtggatggatggatggatagatggatgagagaatgggtggatgggtgtatggatgaatggatggataggtggagagatggatggacagattgatttctctcactgaacaagtaccaacataggcaaaagcaaagcaagagacaccaaaagcatgttttattttgggagaaaggaaagtccttggaaacacaagtccaggcctgcaaaatccttgggctgcttcaccattctgggagcagcaacatgtccttcagctgtcttatattcccttctccagcaaggacataaggacacgataaatacttaaactgcagcaagaaaatttcaagttattctttaaaaaaaaacttttgaaatagccatttgataatagtagacatcagcccctaagtagaaagaaatctatttttcagcatttaattcatacaaaatcttccattttcaataagcattaatttaacacagacaaaatggctatagggtgacagaatctcatctctatatgtagaagatttttaaacaaaaagccacgtttatattttattgaattccaggggcctgaaggcaggtaagttgttgggataacccctgcaatctgccccaactttctagtgttatagaagaaacaatattgaggaaagtcctaggtttccttttctaatttttttagtcttgcaacattaactaacaagaattttcttccaaaattgcagaaatttttctttaagactaggcgggaagagtggaaataaaagtcaaatctaaaacctgcaaacataaacctggagcaggcgagagaccattattgctggtgtctgttctcagctatagaatcattaacatgaaataccttttaatgaatgcattgaaaaaagtgattatatattaaagtacaaaagtctattcctgcaccatttaaattactttacaatgctgattaaaataacagaacattatagcttgcttagctaaccattatatttccaaatccatttccaattgtttcccttcaatttgaacaatttttgagcaattttattgctattcatacctgcttgattttttattagaaattaaaatacacaggttttttatcaatgttgtgaagtactgcaaagtttaactcttttgatgccattcagaacctcaagtcacagggagaagcaactttttttctctcttaattccaggggcttgaagaagatatctagaaatgtcaaagcagaagagcctcggagataatctgaactatttctgagtttatataagggaaaactgagactggagagaactaacatgtctaatattacaatggaaacttgtaataaaaccacaaattgagtcaagtctcctgattcactatatgagcttcttttgactctaagaaactgtccttcacaaagttcccaagaaagaatggattggccagatcgatagaggaatttctgaggaaactgcacttgtgtttttatatacttggcacttattcatgctaaacagtagtttagtgcagtggtggagaaaagaatccctttgaatgatacctgattaatgtgtgtataaagcacacaggcctataaaatagtgtggaatatgggacaagctatcttgatgccaagccatggaatggacctgtgtgttacccaggacaagctccttgttctaaaacctttatcataagtgcaacgaatgactgcctttgctgattatagaaacctctgtcctgctcgtggcaacacccttagcaccaagcacagagcctcacacagagaatgtgttcaagaactcttcagtagataaatgaatgaatgttcctccatcatatggagttttggggtcccaagcaacaaaaatagatgctagttaacgtgaggaggatatgaattggtttaggatatcaaagcaaaagctgaattaacaaggggtcctggaaagttgggggctgagcagctccaggcctctagactgaagaaagtaatgaggtctctttgggcatcctgctgggataaaccctctttaataatttcccatctttgtcttcctcatcttaacattcaggctcccaagaaagagagtccaattggccgagcttttatcacacgcctgtctgttggcaagaagggctaggaaccctgcaatgtagttcatgaagactgtatacatggaaaagggaagtcaaggtgctagtattagaagaaacaatgaattgtgagcagataaaaacatcacatatccactgtacacttgagcttctccttctcctgtagagtgagtgtagcaatacctaacttgcagggtccttatgggaactggaaataggattagaagagtcatagcataattccctggcacatagcatggaacctatcacagctggttttatgtaggggcagtgaagacatggtttaccacaagtcgtggctttcccaatgctgattcctgaactgtggccacactgttcctctttcagaggtgtttgacaacacactcttccatgtgcagatcttacttaccaacgctaccttcattacaacatttcttcagccccagccataaattgagttgtggaaggcccaagccatgccaggattttaggacggctggggttggtatcaggtggagctgaggctaggaaaccaaaataggatgtgagctggacctgaaggtagtggagcagtcaggatcccgatgtctgaggtgtgtgatgagcagaaggccatgattgaggatctcaagaatgaccccagtttgccagacgccaggtccaaggccactgacagattccctggtagatttcaaatggactcaagagcctaaagacaaagaccttatgactccatgtagaaagcctgggactgagctgcccgtgggtgcccagccaggtgcaggggaaaaaaaagaatgctaactgaaaattaactgatagtctaaactgagcaatgagtttggagactccaattgcaaaagtaatgggaacaatgaaaagaagagtattccttgggactcagtgcagtaactaataattactggacacttgccatttgctgggtcccctgctagggagacaggacagagtagtgattaggggcacagatccaggattcagatcatctgggtttgaattctggctattccactgagtggttataggacttcaggccagtctcataacccaccctaagtggggatactaggagcagtttgtgcctgttggagcactaaattagatgattaatgtaatgtgctaagaccagagccaggcactgagaaggtgttcaataagcattaatgatctcattattgtcgtgttcgttgttaagcgtttggtcatgccttatctcatttagttctgagggtctgaggcagtgctaggaaagcatcatgggagacaggcatggtgggagctgagccctgacatgaatggggctaactcaatggcataaggtgtgggaatggtgtttgtcagcagttgggatgagcagtgatgccccttaggtgcagtgagggtaatcctgacttgagagatgaaatcctcaagggcccccaaccccttctccccattctgtggctgggtctcagccaaggtgtgtggagtggttgggtggggggttcaagtctaggaacaaagggagagaaggtcaggtcagtgagccatgtggaagcatgaacaaaagaaggggagttgattttgaaggaggtaacaaggcatagagctttttaaggacacttcatttgagagttagtggttggtagatgggagggtgaaggaaaggagaccagagtggaggagaaagggaaacttctgggaagatgtacttggggggatattccaagccaggcaaatgagtgcaggggaaatggaggtagggcaggtccagggaccaaaggtgaagcttggcctatagaggcacaggcctgggttggagggactctcaagaaaagcaggaatgggaaatcttatagtaatgtcaccaatgacataggctcaaaagggctttgcacctgtttttttcttcttgaaaccaagaagtttcctctcttccccacttctcgcctctgaatcactcagagatcagggctggtgacaagggccagtggcagaggcagtatgtttgaggagttcagaatgcctctccccaaagcaggaggtatatctagaaaaatgaagcctctgatctcctttcttctgtgtctcgggcctcaggctgcttccaggagcccagccatgcctggaacacgtttcatgagtgtctaggggttaacacttcaagaagaaacaggggagattttgctggtgtacactatgtcatgagaatggatctaacgagtgagaggaagctctgatcaagagctgaaaaacctgcacgattttcaactcaggaacccacgcgtaccaccattttcttctacgagaaacctcaacaggttacagatacataatttgaaagaaaacaaccttaagtaatgtgccattctagttaggtctaaattcacatttgaaaatattattcaactaattaaaatggaattaaatgaatacagtgttaactgtgtctagtgtttagcataaaatgttgttaaatatatcatactctgtgttccaaactggcggcagattttagcaatgtttaattgtaagaaatagccatgtactacttaattgcataagtaggtggaacataaaaatcacaattacatgaattatattaagtaaaatatgttaaaatagtttgtttttcgatggtggaattttatggacactataatgaaagtgaagtacatttttaattacctaattattgctattttcaaagtccatttacaccataattgttcctgttttcatagtccaaagagtccatgacagagagactcagtgggatctaaaataaggattcattcttcagacaactcctgctcatggtttccccctatctttacaaaatcgatctcagattcattcaacatgcattcaacaggtaattgtgtgtgtgaaattgctgggaatggtagcaggttgcagagatgagggaggggtagatttccagccctcaagcaactcatagtctaatgacagaggtaagatggactacagcagacgcagaagggaagcatggtcaggagttagagggacacaccaacttctcttgagcggatggatgcatgactgtgggctcctggacccggggaagaaggcaggactgggctagcctgggctggggcaggggcagtggtgaggaagggcatcccaggctccagcaaggacacagaggaaggaaaagcaggtggcatgaagtgttgtgaggcagaccagcccagtagcggcagacagccatgggcaaatggcaaaaagagattcagtggcaaagccagcccaggccagccagaccctgggagccggcagggagattccagcagtgaggagcggggagtgtggggtttcaatcagtggatttggggttcagcatgagccctttggcctgggggtgacaaagcaggagctgcaggaccctgagcactggaagacaacaaggccagtgacagcaacagaaggatcaagggaaaggtgatttaagtgaaaaacaataaatttgcttctggactgaggcgtgttgaggttatataaagatatccagggtagatgcttggaggcatgtttgctcagtagattgaggcttttaagccttttaaacaaacaaacaaacaaatccttgagagcacttttaagcttttctttctctctttttttttttcttttttgataccataggaaattttgagataaaaccgtgaaatgttagggcagtcccttaccacacatattgagttagtgtaatttgttaaaaagcaaaaaaagcaaagggtggccagacgccatggctcacacctgtaataccagcaatttgggaggccaaggcaggagaattacttgaggtcaggagttcgagaccagtctggccaatatggtgaaaccctgtctctactgaaaagatgcaaaaattagccgggcgtggtggtgcacacctgtaattccagctactcgggaggctgaggctggagaatcacttgaacctggaagtcggaggttgcagtgagccaagatcacaccactgcactccagcctgggtgacagagtgaaactgtgtctcaaaaataaaaataaataaagaaaaataaaaagcaaaaggctctcattatgtatcatcaggggaattaaaatcaaaacaacaataagatgccactacacccctgttaaaatagacaaaatcgagaacactgacaactcccagtgcttccaagagtactggggaactctgttaccggaactctgattcagtaccaatggaaatgcaaaatggaacagccacttggaagacagtttggtggcttcttacaaaactgaacatcctcttagcataccatcctgcaatcccactccttgatgtttacccaaaggagattaaaatttatgtctcacaaaaggcacatgggtgtttatggcaggtttattcataagtattaacacttgaaagcacccaagactgccttcagtaggcaaatggataaataaaatgtggtacacccagacaacagaatattattcagcactataaagacagaagctaacaagccatgaaaagacatgggagaatctcaaaagcctataataaagtgaaagaagccagtgtgaaaaggctatatatggtacaatttcaaccatacgacattctggaaaaggcaaactatggagacagtaaaaagattgactgggtgcggtggctcaagactataatcctagcactttgggaggcggaggcgggtggattgcctgaactcaggagtttgagaccagcctgggcaacatggtgaaaccccgtctctactaaaatacaaaaaaattagccgggcgtggcgtcatgcacctgtagtcccagctactcaggaggctgaggcaggagaattgcttgaacctaggaggcagaggttgcagtgtgccaatatcacaccactgcactccagcctgagcaacagagcgagactctgtctcaaaaaaaaaaaaaaaaaaaaaaaaaaaaaaaaaaatcagtggtgtccaggggtaaggagggaaggatgaataggcagagcacagaagattttaggacagtgaaactactctataggatactataatggtggatccatgtctttgtacatttgtgtaaacccatagaatgtacaacatcaagagtgaacactgacatagctatgtactttgggtggtgatgatgggtcaatgtaggttcctcagttgtaacaaaggtaccaccctggtgggggatgttggtaacggggtgattgcatgtatgtgtaagcaacaggaggtatatgggaaatctctgtatctcttgtgaaccaaaaactgaaataaagtctatttaaaagaaaaaaacgcaatggaggagaggagcagattacataaaaggaatgagcgtgctggcacttagcgcacgtttggtgcccagtcctcactctcattctctttagaataagtctacactctttcttctgagcctcgagctgcccctggagtttagacaattatcttcctttgaggatttgagaaaagttttcaaattgcgacaatttagggggattttattttttattttattcttatttctcactccttacttcttcctgcacttggaatcgttaacttgtgctgagtgtggccgccaggccatcactgctagaaaggacgagagattcttagcagtagtcagagagcacccgtcgggaccagtccttctaattctcaaaccaaatgaggttgaacaaacccgggtaagttttggcgcttccggctggttgttccaaatctttgaaagccctctgcgcactctccgtcattcatgtaatcatttaaaatatgtcttcctgtacaggaactgggtcccagccgcagggtaaccagaggctgcatgagtcactgtggttaagacagatcattgaattctcagctggcgtgacctcatagctgggaagccagagggcctgcgccagccaagaggagctagctttgctgatggtgtggtgcaggaagtgactctgccccatacctgagtcctttccataggaagtgagctgagtggagacaacagcagattgagaaagcaagaacagagtctttgattcttgagttttattcagctcagggaaagactgcattcatacctggataaggcattgcacctaagttgactgagacttatcactttcacatcccaggattaagtgtgggggtcctgaagacctatttcctaaagaatcaggcaggccgggcgtggtggcccacgcctgtaatcccagcactttgggaggccaaggcaggcagatcacgaggccaggaaatcgagaccatcctggctaacacggtgaaaccccgtctctactaaaaatacaaaaaattagccgggcgtggtggcgggcgcctgtagtcccagctactcgggaggctgaggcaggagaatggcgtgaacccgggaggcggagcttgcagtgagcggagatccggtcactgcactccagtctgggcgacagagcgagactctgtctcagaaaaaaaaaaaaaaaaaaaaaaagaaccgagcattcaaccctcatccatagaccattccctctttgccaaaaatgtaacaaagcaggaggggattaaaataaaatttttaaaaagttggcaggtaccaaatattgatacaaaaatgaagatattcggttggttggctatacatctccagtgtaggtgtttcaagcatttcccagacattagtcatttagataccacattcagaattgtggcgctatatcatgtcaatactaccctgtactcatatttttctttaatatgagtcaggtctttacttaaataaatttactcaaaaaggaaaattgctgtcactcactgggaagtcagaatcatctgtcataaattgtaaatcacacaaatgaatttaatgaaaacattaaattagaagcatctgtccacagagcacataaaataatcttaaataacatcaatgctatacaagtaaacaagaaacatcaaagaacatcaatggtataagtgtatacaagaaatatccatggtataagtgtagacaagaaatatcagaaatagggtaaaaatgtgagctttaaaaaactaaaactctgaagatagctggtcccaattgtgttgttttaaccataaaataaaatgattttttacattaataggaatatttacagaaaaaggttctaagctgggtgtggtggctcacgcctataatcccagcactttaggaggctgaggctggcggatcacgaggttaggagttcaagaccagcctgaccaacatggtgaaaccctgcctctattacaaataaaaaaattagccgggcatagtggtgtgtgcctgtaatcccagctacttgggaggctgaggcaggagaatcacttgaacccgggaggcggagcttgcagtgagccgagatcgtgcccctgcactccagccttggcgacaaagcgagactctgtctcaaaaaaaaaggtattataatttttttctatatataggatctatagtagagttttccaattggcttaaaaaaactattaaaaattaaattaaatttattattaaatattaaatattaaattaaattaaaattgttaaattttggaggaaaatcaccaaattctcaaagaaaaaccatacaatgcaattacttacaactcacgttctttatgatggtgtatgtatatatgtatacaagaaacatcaaagaacatcaatggtataagtgtatacaagaaatataattctttatgatggtgttatgtctggccatcaaatcgttcttaaatatttaaacttagtctgccagaatactcaagaaattcattttaggcctttttgggggggctcccagcccccaccatgtctcaagctgagcacacaactaggacccctatcagcaaggctcctggcctcatgaagacagcactttgctgcaaaaggagggacctaatggccatgctaaggagacagtaacacaaggtagtgtggtacagagggatgagagtcacctgagatcatcagaaaggctttcccaggaggcagcttttttttttttttttgagacagagtctccgtcacccaggctggagggcagtggtgcaatctcagctcactgcaacctccacctccctggctcaagcagttctcctgcctcagcctcccgggtagctgggactacaggtatgtgctaccacacccagctaatttttgtatttttgttttgttttgttttgttttgtttttgagatggagtctcactctgccacccaggctggagtgcagtggtgcgatctcggctcactgcaagctctgcctcccgggttcatgcgattctcctgcctctctcccgagtagctgggaccacaggtgcccgccaccacgcctggccaattttttttattttttattttttattttttatttttttgtagagacatggtttcaccatgttagccaggatggtctcgatctcctgaccttgtgatctgcctgcctcagcctcccaaagtgctgggattacaggcatgagccaccgcgcctgaccaatttaccaatttttgtatttttagtagagaaggtgtttcaccatgttggccaggctggtctcgaactcctgacctcaggtgatccacccgcctcagcctcccaaagtgctgggattacaggcattaaccaccgcaccccgcccaggaggcagcttttgaatggagacatgaaggactatgacacatccaacctgtgaaaatctctgtgtgcatggctggggttaaggggcagagacagctagtggcagaatgttgtgggcagaggaacaacaaggacaaatgcccaaggtggaacttgtgtgcaaaccttaaaggaacagaaagaaatccagtggtgctggaacagggcaacggggtgaacgagggggagatggagcagatgaggtcaaggagatgggcagggctggtggatgaaaggcgagaactcccttccaaaggacaaacatttatttaaagtgcaaagcaaatgttatagatggattttaagaaaagggaggtcgtaatctaatttacctttaaaaaaaaataaactagactttattttagagcagttttagttttgcagcaaaactgagcagaaggtacagagatttcccatgtgccccctgcatttgacatgcacagcctcctccattatcgacagcccccaccagttggtccttttgttacaactgatgaactgcactaacacatcaccatcacccagaatccatagtttacgtaagggttcgctcttggtgttgtgcattctacgagtttagatcaatgcataatggcatgtatccacctacaaagcagtgtatagaatcctacaaagcagtgtcactgccctgaaactcctctgtgctctgcctgtcatcccttcctcccctcaacccctgataaccactggtcttttcactgtctttacaattttgccttttccagaatgtcacacagttggaatgatacagtatgtaaagcatgtaaaacacaaaacaataaactccttgaagataacataggagaaaatctagatggcctaggatttggtgaggactttttagatccaacaccaaaggcacattccgtgaaagagagaaatgataagctggacttaattaaaattaaaaatttctcctctgtgaaagacactgccaagagaatgaaaagacaagccacagactgggaggaaatatttgcaaaggatattatctgaaaaaggcctgctatccaaagtgtacaagaacacttaaaactcaacaatcacagaataaacaatccagcttaaaaatgggccaaagaccttagcagacaccttaccaaagaagacagagatggcaaatacctatgtcatatgtcctatgtcctatgtcatatgtcattagggagatacaacttagagcaacactgagatgccaccacacatctattagcatggctgaaattgagatcactgacaacactaaatgctggcaaggatgtggagtaacaggaactttcattcattgttggtagaaatgcaaaatggaacagccactttggaagacaatttgggggtttcttataaaactaaatatactcttaccatgccatcctgcagtctcactcctagatatacccaagagaagagaaaacttatgtctacataaaaactcccacgtggatatgtgtaataggtttattaataattgccaaaactttgaagcaaccaagtcatccttcagtagttcaacggatgaataaactggttcatccagactatggaatattgttcagagctaaaaagaaatgagctatcagccataaaaaaggcctggagaaaacttaaatgtatgttactaattggggtgggggaagccagtgtaaaagggctacatgctgtatgattctaacttaaacctttaaatttgttataacattattttctaaagtgtcatggcccattgggaatttcactccccatggtctgaggtagtgggattgtaatccggcagcattgctaatttttctactaattttacaggctttgccacactgtgactgtcaggaggttcttacttgcagaaggagatgcttcaggtacatgtttgtaccagagcattagtaaggctgcatcacagagtgagatgtgcatatcttcaggctctaaagacttaagggaagttcttcgaagctgacagtgaggcctttatgctttcaccatacgtataaaatcagtgtttctggattggaccccaaaaattcattagttctctgctctcagacaagacacttctcccagtggagcttgtttttcactgcctatggagagacaggtgaacaaaatgattccgtgtcttgacctatgacctctgtatcagagaatgactcagtagctactgtgaataaataaacccctaaatccaaagggctcaacacagcagaagttcatttttcttatcaagtccaatcagtggtaatgatggcagtgagaagtttgcttcaagcaaacttgaagcaaacttgttcagtgacttggcttctctctctgttgtgattttaccctcttctagagcagttctggccagtagaatattctatggtgatggaaatgttctatatttccttgtccaatacaatagccactaaagatgtatggctatgaagcacttgaaatgtggcctgtgcaatggcagaactgaatttttaattttatttaattttttaaagaagaaaaacattgaagaacctttattatctcatttcaggacttactttatggtatttaaattagggaaagtaattaagacagttctattagcttatgaatcaatggaacaaacagaatagagtccagaagtgaatatatatgtgtatagatatatatatgtatatatataaaaaatatatatgtatattcaaaatgtatactgaatatatctggaatgtgtataagtatataattgaatatatatggaatttgattacattaaaatatatatattcaattgatctttggaaagatcaattgatcaattgattatttgatcaatttaatcaatagtcttcaactgatctcttggaaaaagatcaattaaagacgatttctcccactacccatttaccttgtcaaggccaaggtggatggatggtggagaaaatccttttcaacaaacagtggtagaacaactggatatctgtatgaaataaaaatggagagatagatttaagaggaactataactatgccacattggtgtatgttatttttgtcaaactgattactgaagtgagaagcatcggctgcaactttaagaggaaggaacaggggcctggaaacattaaataaaaacacaataatcacatagcaaggaaatgccaaaggcaagattgaaatccagttatctgtcatccaaaagttgccccatgatggtatgggagacttgcaggagaaaggtaaagagatgaataagtgaagggcgacaggttgtaagttagacagcaactgaggtctctcactgccccttgtctctctatatatgtattttgggtctcatctaacttcaatttcacattttatttttatttcattgggttggggaagggaagaaatcaagagtacttgggactgtgatagttctttgtctctcatttttatttcatttaaattaattcaaatttaaatagcaacatatgattagtggctattagtagctagagccttggcgccctttctattcagctggcaggtaaggaaggatgatcacagggtaggtttttaaagggccagtctgagaagtggtgcacttcacttccttttcctttcctctggctaacaccgagtcacatgaccacacctcactgcaaaggaggctgggaaatgtagtctagctgtgtgctcagaaagatgaaggaacagattttggtgagcacatagcaatatttatgactccaggattgaaatttcaatgaagactgaaatgtgcaccacttccttttgaagcagctacagaaagcaacaggcaaatccaccaaaagtagttacataagaacagcatagatgccaaactagttaaaatgcctaattacaaatgtttattatcaccagcagtaacaagactaagatcagagatgtgtatgctcaactatgtatattcacccaacatctgtcacatgcctacttggtatcagatactatgccagacacaggggatgccatgatggacaagatattatctgcaaaatataattttaatttaacatggcaggtgtagcattagaggtaagggtaaagtgcaatgaaaactcaagaaaaggatgctgaattcttttggtggtggatagaaagccaatttgggccagggtttccaatagatatgtgcatgtgtatgagtgcagtgatacacataccttgaaagacacttttttgagacacaggagtgtcaaggaataggtggtggggtgtcttcaaatcaaagtcaacagaaaacacatgtcataactccaacatggatgtgcagttctccttatgtcaaattggtggctgacctaaatccactcccggcctcagccatgtgcccgaggtcatcagatacactccacattccttccacagcatcaccacgatatcatctgaaggttagctgggcacattgaatagaaaccactgtctctcctccaacctcccttggagttccttcttcacctcccctctcctgtaatgctttctcttcttccatgtttggtggtaagttatttacatgtctactccctaacacaaaatggtggcctgtcgctgggcttcagtgtccatgagtttattatcttagcattaacacggtatctggcccactaaatatggtgcacttcctggtggcttggtgactcataatcccttcaccttactttcaataatagcatcctaatgtgcttctgaaaggtgaaaggtttacctcgccctctgtcttgggtcttgtaagactgcaagccaaggtgtcaagaatgggacctttgcaaccagcctctcttcagccccaggactttgaatctggagtacagtgacatgaggtcaggaagtggttggagctcatggtcccctgacagtgtacgtggttgagtttgcctggaccccagctataccttggttgcagtctattttaagccagggtctttacccttcccatccattctttgagcctcatagagatttcccatgaattttcttcatctatagctagactgtaagaattccaatttgtagaatgtacatctgtaagtgcatatggaacatgttactaatgaacgtcacagaagactaaatgtaaaatccctctttatgggctagtagaatctgttttacacagaagcaaaatgaaacacatccagtatatattggagtccacaatgggaatggggtcagtcaaacgcatgtgaccagatgttattttcaatatgcttgaagatattttcacttgactcttgagatgaaaagagacaagtaggactgagacttggtacacacttcacaaccttcctagacttggaaaaactttcaaaggctctagagtaaagtcaaggttcccatcttcctgttccccagtactaatcagaatggattcctccttccttcaggacctcctgtccctctccagctgccatgctctcaggaatatttcacccttaaatgtttctccctctggactggagcttcagcttcagtttcttttctgtatcttctacggggcttagcacagggacttccttcataggaggtactcggaaaatatttgctgaattgaatggagttaatttgaattattgaatccaggtaagtggccttggtaagtccattagctttgccctgggaatctcgtctcttgtccttctccatttctattttgccatataaacatgacagagagtgattcagtagtcttccctattcacttcagagggttagaaatgagatgtgaaaatgacagcaagaagacatgtcaataatacccatgtggggtcagcgagtctcccgctgcctgcccaacctttgcaagaagaaagccatcaaggccacttgagtggatctcacacaattcccttgactcaagatgaccatgaggctcaggaggttggcagctaggatttctgttgagagggcattagagattccatgtccctgtcacactgatggaagccctgtttctcttggacatctgagcctgtagatttttcctctgctcatctcatggagcagaatttgtttttggtgtacacttaaaatattagggtcagctaataaaataataagaatcaaaggtttaccaactcataaaatattaagtctttaaggcttatctgacactgtagagccctctgtatttgtggggcctcatgtgtataccttctcccaggtaggtctgtgaatgatggactctaattttagttcttataacgtgtgtgtgtgtgtgtgtgtgtgtgtgtgtgtgtgtgacagagagagggagaactaaatacattatgtacatctgaaaagtcaccaaagacaagaaaaaaaaagtaggtatatatttagctaagtgttctgtggattttttttccttttgaaaaactccagtacaagtgttcaagccaagtagaagcctttcactccagttatttatttattttgctctctcctttggaaagcgatgcacatgtattatgaaaagcaaatattatactctttattgtcaaacaaagtttataaggttcgtgtgtcaatgatggggccaaggacctcacacagaaagtttcctgtcctggaagaatttttcatggaagataaaatatggaaagtggggggaatgctgactgccagcaaatagaatcctcccactcctaatggcacccgtggggttggatgagctcaggccttgactgtcctagctggagcgggggtgggggtgatgggggttcttccctatagactagcatgggccactcagtgaggggaaggaccacagtggaagttgaagggtgtttactcagaggaggctacttgcgtccaactccttgcagctctaacatccagatgcactcggcaaccaggcctttggacacaggaagtagaagcaaggtgatgaaaaatgaaaggcattctttggccttggagcacacaggcatggaatccggtaggagtacagttactatttacaggaaactggcacggagatataacttttgctagacaggttggtgccattgtgttctggcaccatgaaaagcattaaataaggtttaccatttgtctaaaccatgctgtatgcactctactttctgatatgtattgctttctccaactgggagtttcactaaagtccctccctagggagtagagagcgggagttatagtcaaccatggttaatttgtgctttgtgctttgtttatccaaaccatatgtctagatggttgtaattctgtgtcattggctgtgtaatgctctctgtgctaagatatctgtaaatagcaacagctcaatgcataatcacgttggtattctgaagggggaaaaggaagtttcaagtgacgtttgctgtgaagacaaccactccaatgatgtctccatacatgtctcccaggacataatctcttaagtattaatcatgcagacctatgtggatggcacaggacctcacagaagccagacgtggtgggtcaatgctacctccaattctaatactctagccttagggcttgaggacactctagatattaaatcatatcattgctattcagcagccccagtaagtagtttgtgtaccaaagagaaatccttttatgttggtgctagaaaaaattaaaaacaataaaacaaggggaatccaccaaaattttcttttataatattttcatttaaaaactttatttgattcaccagctttctatcaagaaaagacattgtgctcaagagctggaggtgataaagtccaatgtgaatttcttaaatggcaaattaccagccaggatgaacacacaaaggcttcagcttttatgtacggcctagaagccccagggcccctgttccccctgagcacccaagagcagcttctgaacactgcaatgtgctggctggaggcctctggagaagaggaggccagacctgtgaattatggcaaattctactgcaccctgacttcagcaacctcctaaatcagaaaagggggcattaaaaatgtttttccttcatgcaaatgctgccattcatttagaagtgaggccatgttacttcaggtgcccatagagcatgatcatttgagcatcccgaatggcattataggaagcctggccccagagtcagcctcagacggtggagatgtgacaatctctttgaagtcccagggaatgaaaggagtggtctgcaaacaagcctagggggataagctgaatatatttcccccagccttggcagagacgctgcaatccatagctggctcacattgccacacacatctcagcctgtcacattgcccaacagtcttggtgcatttcgttcaccaacccttttaccacagcaacatgttcaacgcatcttatggcctcaaaccccaatcttggcatacagccttgtcctgcactttatggaaaaatgagaagccatcgtataggaacaggagcatctctttcttgcatgacagaatctatcggcccatctgcacctccccatcctcccccaccttccttcagttacaaaggtgaagttcgcccttctccttcctgaggggccttttccctcctgccttctgacagtttccatcaacagatatctattcctttgcttacagtttccactagtctcccagtcttaaaattcatttcctttgctctcactcattttcctcctgctgttgccttatctccttacccttcccaatctggcttaaaagcggtgtgtcagctgggcacggtggctcatgcccgtaaccccagcactttgggaagccaaggtaggtggattgcttgaggacaggggtttgagaccatcctggctaacatggtgaaaccctgcctttactaaaaatacaaaaatgagcagggtgtgttaatgggcacctgtaatcccagctacttgggaagctgaggcaggagaatcactggaatcgggagatggaggttgcagtgagccaacctcatgccactgcacttcaccctgggcaacagagcaagactccatcttaaaaaaaaaaaaaaagcaatgtgtccatatgatgctgtccccaattcctcacctcctttcaatcttcaacccactctttcgactccttcaattccacttcttcccataccatttgatatggtttctgtgtccccacccaaatctcatcttgaattgtagctcctataattcccacgtgttgtgggagggaaccagtaggagataactgaatcataagggtggtttcccccacactgttctcatggtagtgaacaagtctcacaagatctgattgtttcataaggggtttcctcttttgcttggttctcattttctctttgcctgccactatgtaaggtgtgccttttgccttttgccatgattgtgaggcctccccagccacatggaactgtgaatccattaaacaactttttgtttgtagattacccagtctcaggtatgtctttatcagcagcgtgaaaatggactaatacaccattccatcagaacttccctgctaaccgctctaaatcctatattccattcttgccttccatctgagcaccaaccacaagtcaacatctctacttgaacaccctgtgttcaagacataaggtgaccatatgtcttcatttgctctgggaagtctctatttacatgtggtgtcctggcataagtagtcacagcacccctttcagactcaaaaacatcttagacaataaattttaaggtcacatatattagcagatataggcatctgtgatttgtctgtccaatctgtttatttccttattttcattttttgcttttagagaactatcccttgcagatactttttcttttttctttttcttctctttctttctttctttctttttttttttttttttttgagatggaatttctctttgtcatccaggctggagtgcagtggtgccatctcggcttactgcaacctcagccttccaggttcaagcgattcttgtgcctcagcctctcaagtagctgggactacaggcctgtgccaccatgcctggataactttttgtatttttagtagatatggggtttcactatgttgcccaggctggtctcgaacccctgacctcaagccacccacccgtctcagcctcccagagtgctgggattacaggaatgagccaccacgcctagcccaaataccttttcaaaattgtctggtcatatgacagatctacccagaatcagattggtataaagagagttactgagtcaaaagtgggtcaagaccattcacacccaacaaattttgctgacacaatttgaggaggaaaaaaaccctattttctcactggaattgctatgctggtagaatagaatagaagcctgaagagactgggccaactctgccaccaaacttagggagagcctgctagaagagaaaggcagcacagtgaaagcacagcttacagcaacagaagggggaagaaagagaggatgggagggaagaagagagagatccctaatgccaatgttgaacaccaggggctgaaaatctgttccacctgtgggctttatattgcgtaccccaaaactcttctttttcactcagtaaagttggaggtaggtttctctcacttaatgacaagacatccaggatctacacaagcatgccttgaactcagctccaggcagtcctatccctgctgtccccaaatctattcctactccacctttcaaatctcagcaaccatccagtttcttctgccagaaaccttggaatcatcttggacatcttcccttctctagcgccatcatgaaatcttattggtttatttttatgaccaacatatgtgtaaactctggttccttccctccatccacacggacccccaacaagtccataaaaccatcatcttacctgggcaactcaacagcctcccagtgggtcttcccatggccattctcactcctaacattctccgtggaacatctagagtcatcttcttaaacttcaaatctgcttatggtgcacaaggccatgcttcactggggagctgcaaggagagtagagggagcattgccaagttaagttaagagcttcaagacattattgaagctcttgtaattcctgaattcaccaatacaaattctatttcaggctgggtgtggtggctcacacctgtaatcccagcacttctggaggtcaaggtgggcagattgcttgagcccaggagttcaagaccagcttgggcaacatagtgaaaccctatgtctacaaaaattacaaaatttagctaggcatggtggtgtgtgcctgcagtcccagctactccagaggctgaggggggaggatcacatgagccccggaggcagaggttatggtgagttgagatcacaccactgtactccagcctgagtgacagagtgaaaccctgtctaaaaaaaaaaaaaaaaaaattattagagacaatattagcatggttcccaagaatatgtgtcttatttttcaatcattatttgctttattgtgtttcaatcagaagcttagggtcaaactttcttccttgagctgggatatttgaacactgaaggttactagcaccttcccatggacagattgcagagagtggtgttcagattttaaataaaaatctctaccaatgctgccaggatgttaagcagagcctgcacagaaggattgtacatgggtcagtgactgcagggtcatttgtagaccctggtatttgaagtttcctacagaaccttcctggaagtgagtgttctcaaaggaggggcatgcactacctcgccactctaatcttagatcctaacctctctccatctcctccttcctcaaaacagacctgtgggttccaaatttgattgaaactgagtccagtaatattagtcctacctgactgggatgctgtcctgacccagtggttttagaagggagttttatagaagaagatatgagaagggtaaaattagaggggtgcatgcatgttcctgaaagagaagactaaacattgtaagggggccattgcctcaatttgtgtataagtctattataattccaatccaaattttaataaagttttctttgaaacctgacaaaatgattctaaatgttgtctggaagaataaatgaataaaataatcaagtaaagtttgaccaaacagaaagattagaaacatttgcaaggacattaagatagattctaaaactacgacaattaaaatagaatgttattggaccaaggatgggcaggtagaaagaacattaagaatctattccataataggagagctttttcaagtctctgggggaaatgatgcggggacaactgcgaaacactaaagataaattgattcatcactgcttcacaccacatcctaaaataaatgtcaagcggattataaatttaaaaatacatatacaaatgaactagaaggaaatataggtgcatgtttatctgatcttgtaatgggaaaatcttttaggtagtgtattaccataaagtagaatcttgatgaaattgatcacatgtaaattcaaatattctgccataactatatctaagagcaaataggaaactggaaaaagaaacttgcaatgtatgtaacaaagggtttacattcttaagtctctgaaatgtcaatgtggacaaaagacatgattagaaaattcacaaaggaagtactaacagcaaaaatatgaaaaatgtttaactttgcaagctgtcaaagatgtgcaaactgaaacaatagtgaaacacgatttttcagctattacactgacattttctaaaaaagaaaagattatgtagagcctgggaaaatgggcacccacagattgctaggatgatcctaaagtgatacaattgttctagagggtaacttggcaaaattctttaaaatatgtgtagttcatttacccagcaattcctcttctaggaatttatcctcagaaaataatcataaataactgcagaaatttatttaaaaatgttccctggaaggttgtttataaaagcaaaaaattaaaaacaaaataaacgtctgaaaatatgcagctgcttaaataaagtatggtgcattataatccaaggtcataaaaaaatcatactgagaattatgtagtgacttcagaaaaggttcacaatatatagttaaatggggaaaaaagttgcaaacccatctgtacatttcatttttttgtttttaaaaaatgtatgtatgtaaatatatgcatagaaaaagactttaagaggataaccaaaaagttatcagtgattatctctgggcggcaaaagtgttggtgattttcattattcctcaaatattctgcaataaaaatgtattactttttgtaacaagattcttaaaaacattaacttttatttaaatcctgcagagaagtcaggtatcaaaaaatggtcttcaggaagctttttcggggaaattcttacagccaaaaactggggaattgctggggaaagtggtcagacctaaatgcagctgagctaggagaagacaacccacctctcagggccacggtcctggagtcagcagccccatcactacccctgcttcccatcactgctttttttttttttttttttttttttgagacggagtcttgctctgttgcccaggctggagtgcagtggcccaatctcggctcactgcaagctccgcctcccgggttcatgccattctcctgcctcagcctcccaagtagctgggtctacaggctcctgccaccacgcgcggctaatttttttttgtatttttagtagagacggggtttcaccttgttagccaggatggtctccatctcctgacctcgtgatcctccagcctcggcctcccaaagtgctgggattacaggcatgagccaccgccgctggcccccatcactgcttgttttatgagtcatgggatggaaaagtgatatggactaaaaataataataatgaggatgatcacaataataatgcagatgataatatattaatagaaaactgacatttattaagcacttggtattttccagaccccaagctaagtgctatacagatagcatctcatttaaagctcacaacaatccattggcaaaaggattattgcctgggattcatagagaaagaaaactgagaccaggatggtggcacgatgatgtgattctcccacactttcagctctcaggaggccgagcggaattacaaacatacctgagtctgatgccaaagcccctggctgatctacattgattaggtgcttacaggagcatttttccaaacccacatgccccgatcccgacttcaccacccaggcctcaatttcctttgtgattcagcctcgtattatgtagcctgactccactgtgaaagatttgtggcagttgcatgatgtatgaggtgccatttgtaaaaatattatttagtgtaaaacatgatgttttttctcctgatttacaagttggatttataaatctgcacttctcactatctgagttatatatcttgcctctgatttataaaacttgcctgtaaatcttcccagcaaagttttgattcagaaatcattattttaagaattagatttagttaaaacattcagctgctttataggggaggaaatggatttacataactccaaccggagcttacggatcctatagcagcttcacaagtcgtgcctaggaattcctaaggaaaatgttttgatttaagggcattcacttcacactttagctacacctgactgatttatatcaccaaagccatacaatgatgatccattttataaaaatcccacttttctttaattccagaccctgatttatatgccctgattgggtatctgtaatgctctcagtcacaggctcctctgccctagagctggtcttggggaaaaggcctaagaatcagggatggtcagaataaagggaaatttcacctccttcttggtttatctcccttattccaagggagccaaagcaggttgcctcctgcccctgagctagagccagctaaccctgggggagcgtctgtaagatgccacagccttctccaagaatgtggtgggttctctccatccctgctgctcaaatgaagagcggattgctcccaagtagaagaaatcgccagtccagagaatcgaggacatgtttgatgagtaattgctggctgaaaaaaaagtcaatgaataaatgaacgctttttaaagagcagaggccaacaagcagtgatctgacaaatagtataaatgaacgaaaagggagggtgtgtgagagccttgtgagaggctgctccaatctgaacagggtggctgtagctcagctccacctggctgtggttaagtaggattacttgcccagtattcccacatgtggctttccaaggcaatcctgaaattcaaatgtttattttaaatgacttattttaaaaatcaacattgtgcaggtttagtttaaaatagcaaaatacacacattttaaatgtacaggtcaatggcatttgaacaaagtacacactcatgcaaccaccaccctgagcaagacatagaatgtttccatctttccagaaatcatcctcttgcctcttaaagtcagtgacctccatcctaccccctgctccagttaaccgctggcctcatttctatctctacagatatgtatttttttctgttttaatataattggaacttaatataaattgaatcatacagaatgcatttgtttcctgtcctgtttctttcacttagcacgcctgtgagtgagattcatccatgcacgtatccagcatttgttcctttttatggctgagtagtattccgtggtctaaatgtattatagttgttgattcatttccagttggtggacatttgagttctttccagacttaaaactattatgaataaagctgctaggaacattcctggaccagtctctttatggacatatgttttcatttctcttgggtaaaaacagaggaatggagttgctgagtcatttggtgagtgtatgcttaactttccataaagccgccagacagttttcaaaagtgattttgccattttacactccctcccctccccagtaatatatgaaagttccagttgctcaacatccttaacaatgcttggtcttgtcagtctgtttaattttagtcttttagtcagtttagtcataatttaagtcatttagatataaagtggtattccattttaatctgcattttcccaataactaatggcactgagcatcatttcattcactcattggccaattgtgtatcttcttttgtgaaatgcctattcagaacttctcttatttattagttgtttgccttctattattcagttgtaagagaactttgtagactctggatactagtctttgccagatatgtgcattgcaaatactgtctcccagtctgtggtttgttatgtctttttcttgtcaatgtcttcggcagggcaagcaattttaatttgatgatgtacaactggtcatttttcttctttagttagtgctttttgtgttcctagaaatatttgtctacccctaaattgcagtttttctgctatgctacctcctagaagttctacagttgaaggcattatgctccgaacctacgactcatttcaaattaattcttcaaaacaacgtgagcaaaggattgaggttcattttttttctacacagacacctagttcttgtagcaccatagaaatcaggaagtgtgagtcctccaatttcgttctttttaaagattgtttcagctatgttaggtctcttgcattttcagatcagtttagggtaactttgttaattcctaccaaaaaaaaaaaaaaaagcctgctgagattttgtttggaattttgttgaatctataagtcagtttgggtacaaagaacatcttaacactatctagtcttcccatccactaacaggacatgtctttcagttaatttagctcttccttaatttctttcaaaaatgttttatagctttccatgtagaaatcttgcacagctttcatcaaattaactcccttctcattttgaaattttattttctaaatacttgttgttcataataattaacttcatatattcatcttgtattctgtgacgttgctaaattcatttttagctctagtagtttttttcataaaatccttaggattttctatacggataatgataacatttgttaatacatttttatttcttcttttttaaatatttctctcctttttaaattcgtttgtttatttattttgccttatggcattggctaggacatccagtacagtatttatgggaagtaaggagactgaacatctttgtcttattcccagtcttagggggaaagcattctggctttaaccattaacaatgatggttgctgtatgattttcatagatgcccacgatcaggttgagaaggtttccttctatttgcaatttgctgcgtgtttttcatcatgaacaagttttggatttcatcaaactcttttgctgcatctatctactgggattattatatgatttttctactttattctataatatgtgaaattgctttgatttaatttttccatgttggaacatctttgcaatactgagatgcagtcttcatatagtgctgaattcagtttgctaatattttgttgaggattttgctttgtgtgttcataagagatattgacctgtaatttcctttccttccaactgcattgtcggcttttgatatcaggattgtgctagcctaataacatatgttaggaagcagtcacgcctatatttttggaaaaagtctgtgtaatattgatgttatttcttttgtaaatctgtgatagcattcattggtgaactcatcacaacaccgaatttcttgtatgggaagtttttttatgataaattcaattattttatgtttttccagctttactgtggtatacgttacaaataaaaattacatatatttaaagtatacaatgtgatgttttgagctatgtatatatcatgaaatgatccccacaaccaaactaattaacatacccttcacctcgcacaataaaatatttttcatgtgtggtgaaaacacctaagattaattctcttagcaaatttcaagtgtatgatacagattaatctactattgtcaccatgctgtacattagctctccaggacttatgtatcccaaataactgagcctttgtgggctgtgaccaacatttccccatttccccccaaccccaacccctgataggcaccattctactctctgttcctacgagttcaactgttttaggttccacatataagtgagatcatgcagtatctgcctgtctgtctctacctgacttatatcacttaacataatgtgctccaggttcatccatgttgtcacaaatgatagaacttcctccaatgtgtgtatgtgtgtgtgtgtgtgtgtatcacattttctttccttctcttttttctttcttttttctttctttctttctttcctctttctttctttcctctttctttctttctttctatttctttctatttctttcttctttctttctttcttctcctcttcttcttttttttttttttttttttttttaatttgagacagaatctcactctgtcgcccaggctggagtgcagtggcacgatctctactcactgcaaccacggcctcctgggtttgaacaattctcatgcatgcctcagcctccaaagtatctgggattacaggaatgcaccaacacacctggctaattttttgtatatttagttgcaaaggggtttcaccatgttggccaggctggtctccagtgatccacccacctcagcttcccaaagggctggaattacaggtgagagctaccgtgcccagccacgtatttgttattcattcatgtgtcaacgtatgtatgcttaggatgatttcatatcttggctattgtgaataatgctacatgggggtgcagatatctcttcaagatactgatttcatttcctttggatctatatccagaagtgagacagctaggtcatgcgacaggtctattttagtttctagttatttttagttttttgaggaaactctgcactgttttccacaatggctgtaccatttacattcacaccaacggtgtacaaaagttactttttctccatatcctcatcaacatttgtcatcttttgtctttttgacaacagccattgtaacaaagtgtcaggtgatatctcattgtggttttagtttgcatttccctgatgattagagacactgagcaccttttcatacacctgttggccctttgtatgtcttctttggagacatgtccatttaggtccttagttcatttttaatcaggtatttggtctttattgttaaattgttcgagttcttttaaaattttggatattaatcttttatcagatatacagtttgcaaatattttcttccattcccttaggagtgtcctttcactctgtttatttttttcctttgctgtaatgaaatcggacccttatctcacaccatacacaaaaataaactaaaaatgaattaaagactcaactgtaagacctgaaactatgaaactcctggaagaaaacatagggaaaaaccttcttgtcattgatctgggcaataagttcttggctatgacaccaaaagcacagggaatgaagggcaagtaataggtagaattgagtcaagcaaaaagcttttgtacagcaaaagaaacaatcaacaggctgggcgtggtggctcaggcctgtaatcccagcactttgggaggccaaggtgggaggatcacctgagctcaggagtttgagaccagcctggccaacacggtgaaaccccgtctctactaaaaatacaaatattagccgggcgaggtggcacatgcctctaatcccagctacttgggaggctgaggcaggagaatcgcttgaacccgggagcagaggctgcagtgcacagagatcatgccactgcactccagactgggagacagagcgaaactccgtctaagaaaaaacaaacaaacaaaaaacaatcaacagagtgaaaaggcaattctttcaatacattggagactgttcaattttttattgccccttgattcagttttggaatacactagttttaaagtaatttgtctctttcacctaaactgttaaacttatcaggctgaagttgattgcaatatgtccttatgataatattcctcattatttcttactattattattgcttcttattattctttaaaatatgcatatattttaaattcttctaaatatgtattaacattctacaggatatgtattaatatccccacttgcacctctaatactgtttatttgttttctttattttttcattaatttgtcttcctagagatttactaattttattaagtttgttttcaaagaaccaacttacggctttgttaattttccccatgtgaatgtttaccattcattgatgtttgttcttatttatattaattctgtcctctctttgctttgagcttattttctttttctgtctataaaatagaaacatcaataattggtattaaacctttttcttttctaaaatagatattgcaagctatacattcttttcgaagtattgctttagctgtacactgcacccaacaaagtttgaaatgttaaattttcatcttcatttgcttcaaatattttaaatttatcttgtaattttcactggcttctgagttattgaaaaagcttgttttattccaaaatgtttagagattttctagatatgtcatttatattgatttctaatttaacgccatgtggtcagaaaacaactctatctgactgcaatgttattaattttgctgatatttattttatgactagaatattagctattttggtgaccattccatgtgcatttgaaaataatacatattctgcaggtgtttgtggtagttctataatgtcaattatataaaaattgtggatattgttatattaatctttgacatcttcatctatggtttgtatatttttattaattaccaaaagagaaatgttaaaatttttctatcattgtggctttgtccatttttccctttatttctgttaatgtttccttcgtgaattttttttttttttttttgagacagactcttgctctgtcacccggactgcagagcaatggcacaatcttggttcactgcaacctccacctcccaggttcaagcgattctcttgcctctgcctcctgagtagctgggattacaggcactcaccactacacctggctaatttttgcatttttagtagacatggggtttcaccatgttggccaggctggtcttgaactcctgacctcgagtgatctgcctaccttggcctcccaaattgctgggattacaggcgtgagccattgtgcccggctatgaattttgatgccctatgataaacggtatacatatttaaaattgttctaccttgctagtgaattgttcctttaatcattgtctaatgcccgtatttatctcttactctttgtcttgaaatccaccttctctaatacccatatagccacgccagctttcttactcttattgtttgcattgcatgttttatccatcttttacagtcaatgtcttgttatttatttttaaaatgtgtctcctacagatagcatcgagttggatctcactttttttcctagtcaaaaatctctattttcattgggatgcttagtatatctgcattttattatttgatgagttgaggtttaagttcatcttataatttgatttccacttccctagcatgttttataaaattatttctattgcttatttcctgtattctttgataaatattttagatatctaatacatcttctcttttttgtacttaatttttgtgtgcttgatgtagggctactaaaatgtgttttttaaattatcagtctatttatagtcaatattatacctcttcacatttcacacttcccttctgatactttatacttcctgttttacaataaatatttttcccaggatatgatttttttacctccttatatccttcctacaattgctatcctattttttacttatctatatatgttaaaggtcactctacagtgttattatttatgtgataagtaattagttttattatgagtaatttaaataaattatgagaataaaagggaggcttttatatttacagactcatttccaatttctgatgccctttattttttacacagattctaaattttcatttgctgttatttctttcagcctgaatgatactattcactatttcttttttgcaagaatcctagtaataaacttcctaactttctttgtctgaaattatcttgatttcattctcactttcagaagctatttttgctggatatagaaatctaaattgacaggatttttttttcatttacactttatttttattcttattttttggagacagagtactgttctgtcagactaaagtgcagtggtgcaatcatagctcactacagcctcgacattctgggctcaagtggtcctgcctcaacctctcaagtagctggagactacaggcatgtgacaacatgcccagctaattaaaaaaaaacaaattgtggagatgggatctcactatgttgtctaggtttgtcttggactcctgagttcaagtgattctcctaccatggcctcccaaacacttgcacttttaaaatgtaattaaattgacttttaatagccttcattgtttgatatgaaaagtcaacagtaagttatttttatccttttgtttcatgtctgtaatgcgtgtttccagtatggcgctttcagtattttctttgcaatttgactctgattatttattttacatttatcttgcttggaattgacttagatttttggttttgtttttaatctgaaaatttttttcttgtttttcattcaatttgttaagtttttagtcattgtttttctaaatgctggtgtgctccttacaattgttttctgagactcaaatttcaggtatgtaaaagcagtagttctcatattttttggtcccaatacttctttacattatgtaaaattttcaagcaccacgaaagcatttgtttatgtagttatatctatcaatatttatattagaaagtaaagcagacaaattgttaaaaatatgtattttgacacacataaaaacaaaaataccataacacattaaaataaaaaagatagacttattgaaaaaaatcaaaaattcttcgtgagaagaatgacactttcacagagtgctttttatggcttaatagaagacagctacagtctcatatttgtttccgcatttaatctgttgttatatcattcatcttgcagtctatggaaaactccactttacacctatgaaaagatggacgtgagaaaggcaaataatatcttagttatcataaatatagctttagtagtacagattttatgaaataatcttggggacactcacactttgaaaactgttattaagcaattaaatattttcacacaggtccataaggttctgtttattttttttaattctttttttccgtatatgttattgaaaaatgctattgatttataaacaagatccttctttctctgcccagttataatcttctgttaggttcatctggtaatttttttaaagtttcagttattataattttctgttactgaatttccattcggttgattttttgtatagtttacatttttctgctcagattctttttctattcaatcattaggaccatatttttctttaattctttgaaaatattatacttgttttaaagtctttgctagctccatcataggagtcatcttacatttagtttcttgattatattttctttatccctgaatcacattttcatgtttttatttttgtatgcctaagtgatatttgattgaacactgcacaccacagattatatgtggtagagaatgtggattctgttatcttttcataggaatgtgtgcacatgtttattaggcagttcagttgcttgcacatcgtctagtaggcttggttttatgttttttaaataataaatggaaagtccaaggtatttcccaagcccctctaatttgacaggactcaaactgcaaactcttgttggggcttcaatttggactctgttgggacaaattaagaatagttcttataccttagacacaattttctgttgtcttgaaagatgctgagatgttaaccatatgctcaagagatctcttcactctaataaggttgagaatcaagcatccagccccaccacactgcctgtcctccgtcactgtcaaagctttagtctctctgctctactttcaatctcccaacagcttaactctggtaagcactaggtaatctccatgcacgtgcagtctggttctcagccatggacttgcagggaaccacctacacacctccctttctctgatgcgccattgtgcagactgcagccatttgaagtgactcaaactctgacctcattctcctcagctcagcatgcccaccatcctctgcccagatatcagcttgctctgctgtgattgtgctactattacaaccccggcaggggactgaatgaccagaaatctcctcacatgagcttcccttctctctgaaatcactgctttgtgttatctaattgttattgccccaaatcagttgtcatacgttgtgtctagttttatagttctttatgacaagagaaccaactgagctattccgtaaacctgtgaggttcactgggcccacatacctcactctgatcaggcaatctgccctgtcataccatcttcacttgatgcctagtagacaattattcaagggatgtaaactatatagataattaagtgggtaatttcatttcctcagtggatttttaggcatatttttgaaatgcatacttctctacttagccagtgactttcctctcacatatggcagccctggtctttgaatcttcacttaaaatttgtcccttccagaagacagctttagtattagtcagggttcttcagagggacagaaccaataggatgcatagatagataagtgagaggctatttattaagggaattggctcacatgattatggaggctgagaagtcctacaacaggccatatgcaagctggagacccagggatgcctgcagcatggctcagtccaagtccaaaagcctcagaaccagagaagccagaggtgtagcttgaagtctgaggccaaaggcctgaaaacctggggcaggggttgctgctacacatcctagagtacaaaggcctgagaatctggagttctgatgtccaaaggcagcagaagatgggtgcctcggttctacgtgagagaacctggagttctgatgtccaaaggcagcagcagatgggtgtctcaggtctagaaaacagaatctggagttctgatgtccaaaggcatcagaagatgggtgtctcagttctacgagagagaacctggagttctgatgtccaaaggcagcagcagatgtatgtctgaggtctaggagagataatctggaactctgatgtccaaaagcatcagaagatgggcgtctcagttctaacagagagaacctggagttctgatgtccacaggcagcagcagatgggtgtctcagttctaggagagagaacctggagctctgatgtccaaagtcagcggaagatgggtgccttagttctaggggagagaaagcacaaactcaactttcctctgcctttttgttctatttgggaccccagcagattggatggtgcctgcttacattgagggtagatcttcccatctcagtccaccaattcaccctccaatctcctccagaaatacactcacagatgcacccagaaataatgctctatcagctatctagatatcctttaatccagtcaagttgatgcctaaaattaaccatcacaccctcctaaaccaacctgtctgaagccttcaatgaaaggaaagatgcacatatatctgtagctataactactgactgtttatatggattaagagaagtatagtacttcatacctgtcattgatggattttttttctccactgcacttagaagaactacaaccccaaattccttagtctgaccttggcacaattccatgcttggtccctagtcatttctaatccatgttggtaactcaacctacaattatactgttacacacttacagacttcacttaaaacaagtctgtgggatttttgccatagtcactcctaactatcatccatccactcacccctgtgtagtcagggtcccactgtatcacaccaacccatgcatggtatcctatatcatataatgccctgaactttcccgtgtcagagggaggtgagcccggcaggctggtattatagtggtgaccgccctgccgcctgcatatgggatgagtcctctcaaatagcagaagcagagggggtgggggcagatgcatgtcccaccgacacaggataccatcctcgggggctccgtgcctcccctgccaaggtcagggttgttcagatgatatgggggagcagcggagtggtgttcatcgagctctgggaatgggagctgggtcccctctctgtgaccttaggaagcttatttaacctcactgactctgttttcctcatctgcatttggaaacttgatgtaacaatatcaaatcatgatttctcatgtggaatacacttggaggagggcggtttgcactgtggttgctctaccctgagggtggttatcagcaaggcctttttaaagtagacttgagctttaggtattaagaacctaaaacatgtgcataacttttggcctgggatttctctccatttttaggtctgtgttccaaggaaatgatcagtgatatagttaaatatttgcattcagggatgttatttgaaactttatatataacaatgacagtgtatgatataatttgcatctgtgtctgcacccagatctcatgtcaaattgtaatgcccagtgttggaggtggggcctggtgggaggtgattggatcttgggggcggatttcctccccatgctgctctcttgatagtgagtgagtgagtgctcattagatccggttgtttaaaagtgtgtgcacctccccactctctctcttcctcctgctctggccatgtaagacatgctggcttcccctttgccttccaccatgactgaaagtttcctgaggcctactcagccatgcttcctgtacagcctgaggaactgtgaccaattaaacctctgtcattaaacaagaagctacttttataagaaattttataagaaattctcataaattgcccactctcaggtatttctttacagctgtgagggaacggactactataaagtatatcagtataaaattagcctacatccaaatatggaagattgcccaaattgtgatttatccacataatgggatatgtatacggtcattcaaaatcatttctttttttttaattgagatatggcctggctctgtcccccaggctggagtgcagaggcatgatctcagctcattgctgcctcgacatcccgggttcaagtgatgctcccacttcagcctcccaagtagctgggactacaggcacatgccaccacacttggctaatttttgaaatttttgtagagacaggttttcaccattttgcccaggctggtcttgaactcttgggctcaagacatctgcccacctcagcctcccaaagtgttaggattataggcatgagccactgctccttgcctaaaatcttataaagaaaatttaatatcattggaaaatgcttacaatataaagcagtcaaataaatactctatgtaatttgttatgtatgtataaagtatataggaaaatattcacagtgttattatctctggatgatagtgttgattgttggtgatttattatttttttctttattataatattctatatttttcaattgttgcaagtcagtatacaataaacaaaaatcttacttacgaaaaaatgttggagttaaagtctggggtctggatttgagtccaggccccaacatttgctgtgcaaccttaagtaggagaaagctgaaaaatgggaaaaacttgtctcacccttctcattggataggcaaggaactaaaataagataatgtgcacaggactcatgtggaaggaaaatggcaaaaaagataggggggctattgctcatatgaatctgactaggaaacaagaagctgctcttaaaagaaatattgatgcttacaaggtttcaggtcacccctatctcctccagcctatctttaaaatagacaaaattcaaaacaaaacaacacaaaatctcacgcagaaggttcttctgcctggtaacagaatgcttctgtgtagttaaaacacaagctacatctgacaactgcactatcagatgggagctctggacatgtgaaaatcattgctcctgtactgtaagacctgatagagccctggtcagccaccagccttgcagaggattacatggggtctccatacaaagctggatgcttcaagatagttgcagtctcaagagtgcattccctgcctctgacggagtggtaggggctgttacaacccatcctgtggtgcccaagaagacactcagcattcattgcaggtagtgtggcccccagtgcagccacattggaatccatttgtaatatttatttaactagaaaatataaacgtcctaagtcccaacaatcctacttctctgcagcaactctagggatgtatttgctgatgtgcatgaaatggctgggcattccttttaagtactacatgatattccatagatgaggcatgctaaaatagtattcagacctcagagacttctcttattgttcagcatctcgagttaagctgcaatgaagtgaatcgacatgtcacaacatcaaaagtctccaagagtttgttttttttaaatttaaaaaagtatgttgctaatcagaatatacactatcaaatcatttatataaaaataagtcaaaacactacaattctaatttctgtgggtgtataaggctcagaaaaatgtctggaaagattcataccaaattgatcatattgattagacctgaaggtatgggtgaatgtggaggatacaatctttcttacctgtatttaaaatcatttttaaaaagaatgtgttcatgtattacttgtgcaattcacataaatttgacagtaaaaattaaaatagctgacataaaataattatgaatagtcaacaactgaacaaacaaataaatatactatagtcattcaaagccaggtttctcattgttggagaaaggagtataaaattggaaaggggaggaggagacagaataagccctaaggtgctggattgaaattgaagttataagtaaaaactcatggtttaaaaagggacagaggaagggaggaagggagagagagtgagggaggtcaggggagagaaggagagagataaagaaattgttcatatgcatacgcacagaggacctggaagcaatggaactccaatagcaacgagcatacttagcatggaggcgtttctttctatgtcattctcctctaagagaagacagggccacttacaaaatggtcattgcaggcctgcaaccgagaaagcacaagatgagcctgaaacttctggtcccaaaaagtaaggaaatgctcaaagaataacagggacatatcaaaaggacaaagaagccaatttgcagagactcccactggccaaatatgaggcaaatttagcacaaaaataaataatgattgaaaatcatgatttattgaatgaaataagcattcaccagttacatggatataaataaataaatgaaaaagaaggaaaagctcttccttgcagtagaaagacaattagtaaatgtagaaggaatactataattagaaaaatttcctcttggcaactatcatcatcatccttgaatcaaacaagaatcgtcaacggatattaaaactactgaagggatgtttgaggaataacaggggatatttacatagtcttgaaatatctcccataagacgcttacttatttcaaaggaaaaggacattttcctaagaatggagaaagctggcaacaccactgtcaccaagacatccagattagcaactctaatcatgggacaaagctacatcttgtgccccctgacaggaagaaccaaggagaccaaggcaccattttggtggtatttctgccagaaatgagtaatgcaaacctaatcctcataaaatatcaggatttaaaaaacccaaattgaggacgatccacacagtagccagactccagccctcaaaaacgtcagtgtcatggaacacaaaggaagataaaggcataaaaggaggccaaggagagatgagcaccgaaggcaactcacgatctgtgatttccttccaccactaaggagagtgttaggataatcagccccatcagaacaaaatctgtagatgacgggttatcctatcaatattaacttcctgatttttgtgtattttctaattcctgtgtttatggaagtgcacatcttgtttatgggaaatgcacgctgaagtattcatgggtgaaagagcatcaggtctgcagttaattctccaatggttcagaaaaattaaagtgcgtgtatacacacaattacagtgtgtgtgtgtgtgtgtatgtatgtatgtattagtctgttttcacgctgctgataaagacacatctgagattgggtaatttataaaggaaaagttgtttaatgaactcacagttccacatggctggggaggcctcacaatcatggtggaaggtgaaagctacgtctaacaaggcagcaggtaagagaaaatgagagccaagtgcaagcagaaaccccttataaaaccatcagatctcgtgagacttactcactaccacgagaacagtatgggggaaacctcctgcacgattcacttatctcccactgggtcctgcctgcaacacatgggaattatgggagctacaattcatatgagattgggtggggacacagccaagtcatatcagtgtgatacataaaaagagagaggaagagagaaaagaataaaagctggtaaaatgctaacaattagggaatctgatgaagagaatatgagaattctcgcaacttttctgtaagcctgaaattacaaacttaaaaagaaatggcaagtttaaaggcaaaataaaggggtagacaaaacaacttgcagcaagcaaccagggtctccagccaagatgtcagagtcaacaacctggccaatactgcggagaagctgtgtatacagaatactcaaaactctgggtccaaggccgggagcagtggtccctgcctgtcatcccagcacttgggcccaggagttccagaccagcccaggcaacacagcaagaccttatttctaccaaaaaaaaaaaagtttaaaagactagcaaggcatagtggcttgtgcctgtggtcccagctacttgggaggctgaggagggaggatctcttgagcctgaatggtcgaggctgcagtagccatgatcgcaccactgcactccagcctggagagacagccagaccctgtttgaaaaaaaaaaaaaaagaagaagaaggaaaaagaaaaagaaaaagaaaaatatctggattcaggttcaaatgtcggccaagagaaaggaggacagtaagacctttcaaaaccttcatttctaaaacaggactattaatcctaaatcaaaggatgctggggtgatggagcaggttttgagtagttttgagtggagagcagctagcattgagccaagcccctagaacctgctcaagagatgagagtgtggctagtccctccctgctcgcttgcgacccccaagaccatcactgaaatacacagggaggtgagggcctcaagtacctgagacgctaagagtaagcacagagtgggtgaggagcctctgcctaggggtcaagtcagtgtcccgttgggttgcagaagctttttattgaataaagttccagggctccagtgatctgtcaatgctgcacctgcagcctgaggaagtaggaaaagctaggtgtccgcttattcagaggggcaggatagcccacccaacgcttgaaacgcatgtgcctttccagcgcagttggatctagctttggaaacttggaagactgatatgaagatggtcccaggctgctgcagtccttggcactagagggcaggccagcaggttccctgtctgcccgggtcaactgaacagggaccttggcaccgactgcagagtggctgctgtctacttaaacacacacacacatgcgcgcccgcacacacacacactctccaaagggaagcttaatatataaaaaatatagaattcatagaatcaaagtaaaattgaattcctcaggcagtttaactctttccccttgggcaggaaaaggttcagttttgacaaaacctcgaatacgcctccgctgagacctgctgtcacagctctgggtttgagcatccacagttcaggatggagggagaccccagagatagggccagacaggcctccgcccctccctctggcaggtccttcatctccccaaccccagcttcctccaaggtgacatgtaaagacagcactgtccagttcctcctgtcatcatggagataacagataacatgcagcgtcctggaagacactccgtggtcaataactagcagcaatgactctgattatcatccacatttgcttcctggggatacagaaatatatcctccctggagcctcggttctcctggactcagagagggacatgagctgctgctctgagctgttcctggtgcaagagctcccaggctgcacgcgccaggcacacagcacatgcccgggacacacctgtcgagtgaacacatggacaggcacagccaaatctttctgacatcttaaaagcactgaaggaaattctaagtcctcttaaaaatatatctttaagcacatctatgagcatgactttcctcacccctatacctgcaagcagacattgttacccttgagtctaaatcatcttttcccttttgcgttgcaaaaattttccctgacagccaacagaacatattcttcttctaattgttggtttacctctcacaaacgctggtggatctccccatctctaatcctcacccgctcattcattaactatcaagtgtggctttttggaacaattatattctgtcctgctgtcagctctatccacacaggtagagaatacatcccaactccttacatgggatgtaaattattgctggcataccagtacctgaagaatgattacacccagtgcacagttaaataatggatgcttagcacagtgcattgtaataagcaaaagatatgaaatatctacaattctaagtggaatacgctaagtattttttttataataaaaccgttttgggggaagacaggctattgaatcatggtctccagaaaagacacccatgtgtcagttcatttgcagaagccggctggcgctgtcatctcatctgtgaagtggggacaagaatcatatttttcatcaagtagaggtactgcttagcactgagcctgacacacagtaggtgctcagtaaatggcagtagctgctgtcatctgaggaatggctgccctggctaggctagcagtaggctggggcagtatctcctcgtgggaagagcagctggagtgctcaccacctagatgtacctgtggtcaggtttggtgtctgaccacagggaggggcaggcacaccaccctgccccaccccacccacctttccactgggaagctgagggtagagcctgctttgccaccaaacacagtagaaggttctggagggctgggaggaaatggagttagggtggctcttgaagacttctctctgccttggaagccttccagaaatagaaccctggaactcagtgcagtgctcaggcctgagcagtaggggcctcttcctgagccccatgctctgcagggcccttctgtgatccttgtcccagggcaaggagtatgcagatacaggggacatgtctgcctgggacctgcatccttcccatttcagagcatgctttagcccccttaggaagtccatttcacagcaaaggaagctgaaacccagaggatactggtttccctgcaaagcagaagaggtggtcttactaattccaaaccagttgttccttattccaaagctgttctggcctcaccctgcctcctgctccctagtgacatgggtgcctgggatattttgcacctgtgcaacaggcacctctttgacctccttcacagcaaatgaagctgagacccagaagataaaggattccctgggaagcagaagaggtggtctttctaattctgaaggtgttctagccccaccctctccccacgcctcccaaccctgccgtgatatgggttcctggaacctttgcatctgtccagtgggcacttctttggccacctagaccagtccatctggtgttctcaagccaaggcccccggaagatgcagcaggctgtgctgagtgggaatgaacacttcctgctctcattcctgcctggggaggtggagtgggacctaccacagagccagggctgagagcagcagaactatctagaacactcacgccagcatcctacccactgcagcgctgatgccggagcaaaccgcctctgctcaagggcttctcagcagagctcccctctgcagtccccacaggaggcctggagctcgggtggtttcccagggctggaagtgcatggttttcctctgtatccctaagcacccctgggcactgaggcacaggacatagtgctggggtgctgcgtaacctgcagatgtttccaaccttctaagtctcagtgtgtaaattcgtttcctgaggccatgacattaaacatggtggcttaaaataacagatatttattttctcacagctctggaagctgcaagccagaaatcaaggtgtctacagggtcatgctccctcaggcttcaggggaaaatccgtttcttgacttttctggcttttggtggccttcctgaggttgtggctgcatccctgtaatctctgcctctgtcttcgctccacggtctctccctatgccagctcccccgtgtgtctcttgtaaggacacatgtcatcaaagtcagggcccacctggataactcaggatgatcttcacatctccagacacttgattcacttatatcaggtgatatggtttggctccatgtccctaaccaaatctcatcttgaattataatccccacatgtcaagcatgggaccaggtgggagtaactggatcctgaggtcagtttccccatgctgttctcatgacagtgagttctcagaagatctgatggttttatacgcatctggcatttcctctgcttgcagctctctctcctgctgccatgtgaagaagttgcctgcttcccctttgccttctgccatgattgtaagttccctaagtcctccccagccatgcggaactgagtccattaaacctctttcctgtataaattacccagtctcaggtatttcttcatagtagtatgagaatggactaatacattggcaaagaccctttttccaaataaagtaaacatttacaggttccagggatcaggatgtgggcatatctttttggagaccaccattcagcccactactgtgtcctcagttataaggcacaaataataatactattagcctcataaaattatggtgaagatttaacaagacaatgtatattagacaagtgctgaaaatattcagtatagatattttaattttctctgcacatacatttaggtaaaaacaatatatagatcttgataatagagtcctagtgcacgtcaaacatttacttgcttagttaatcgaaaccatctctaaaggttatttgcgtattcagggtgaggtatcctcgtgcaaatcccaagacaaggtgttcccagggacaggggtagttggggtcattagaggggctttaaatatcactgatgagtcactttcattgtactagcaaaataagcagttcaagtacaagagctaaggtttctaagacacacatagacttttcagagaaaaatgcagcaaatggatcaagataagaagaagaaagaacaggattttttttaagattaaaaaaaggaaaacagtcatagatgtccttggcagagaaatggctgaacgcccaaagttgcatctcaactgtgtgcccctccacaggggttaacagaaaagctgaagggcctgagaaaaccaagtctccaacaatatgtgcagaataattattaattttttttaatctttgtagagatgaagtctcgctatgttgcccaggcaggtctcaaacttctggcctcaagcaatcctcccccttcagcctcccaaagtgctgggattacaggcatgaatcattgcacccagctgcaaaatgatcatatatgtaaaaagcaatagtctgtgcatgcatgggtacgctttcctgtgcacatataagcatggaatgatgacatacttctacctcgcaacccggatagaaagggccaactccctgtcccccacccaccagttcaccactgtcccttcagcaaagggacaggaatgaagagggagttttactacttctgtaatgtgtggcaatttctcagcaaagacggcagcagaatttgacagtgcaatctcaaaattaaggaaatttcacatccagctgtcaaaggctgtcaaaggacagctgggtgtgactaaggcagaggagctcctgctcttgtctgaacactactctcctccccacccccatctacagaacagaccggctcacagacaacctcccatactaattctgctgcaaggatttgggtaccttgccaggcaggtcctgggcacctggcagattttgaatgggagactgagtgacctgctgaccagccagcctcctgagacccactggcaaataccctgtggtcttagcatcccctgctccatccacttgcatgaggacaaaatgaagagcttcaaggtcatgcctggttagggatgctgggtaccctgggtaccagagtgctgtgcccaagggtgtacacgttctggtccccagcacggccgggcctgcagaggaggcaggagtgagtcaccacaaagctatgctgcacaggtgcagtgaaactgtgatatgctgggaactgagcccaggctgggctgtgggccctggaggaaagggggccggtcagcaccaatccccggggctgaaatataaaacacgctgtggctcgccctctctgagagtgcactggctttcatatttctgaggctttgttttgccacaatggatgcatttctgagttcctgtctttgtaaacagataccgttcaatgcggcgggtgattttcaggccatccgcctctctgctttcccacattttggaggagcagagttcaagttctagttcttgccctagctgtggtgtgatccacatgggctgagtccccattctgggctccaacctgctctgtgaaactgcagtcaatggggctagtgcgtgtctaaggacagcgggaagtggcctgctctgaagtcatccatgaatcctcttagtcattccccggggtgccctgatgctgatggacaaggccacacttagattcaagtatgcaaggaaggactgcagcatctaaaagctatcacctggccagcatctggagaaggtggtgctgggggcaggtgcctcagcaggagtggggaaggaaggaagtcacttcaatgaatgataatgaactttgcccaacatcctcctagctagaggagagtctgggtttcctttccagagactctgatcagacaaagaatcagcttttggttccatgctttcctggctctctggtgactggagaaggaaaacgaaggagatgaggtttccactgttgatcatcaatggggaatgccaaccaaattttgcagagtgttttgaactcccccaaaacccctctgcagtaggcaatggtgaatccaaatagcacacatctaggggcagtgaggacgggctctgcttgctaccctctgcagggggacacagtaagctgctctgaaaccccagctgctggctggagtgggaggcagcctggatgctccagaaactccaggcctgcttcataactcaccatgttgcaggaatgtgtcatcctcagaacaacgtcactaaaggcctgggggatttgcgtctgcctcaaaatcatacccggccttattttcaaatcactgcgcttaccaccaagagttgtgccctttcttttatgcatggcaggggcgccgggctaacacgacctgagctcccttcccattcaaagccacaccacggacacctgtcactacagctgctccccaagcggctgtgtgtggttttggccggtgtcacagtcactcaagcaccccggggtttctgggggcagggtcagcttgccctaagacaggcagagcagcagcagaggggtctgcgcatgggaattctgtatccttctctgcagggaatggggaatcccttgtccttagaaatctgggggcatctcatggcctctacatctaaaagaaccaggtaagcccccccttactcagtgccaatcctgttcaagtgttgctcaggggctagtgttggggtgatgagtgaggtgtttgcagtcttgggaagaagctcaatgttcaccctgtaacagaagttgagattgcccaggacaggaggggacggtccagtcactggaagcggaggggtgtggggtgcaggggatgcagtaggagagcgcaggggtggcgccaaaactgagtgcatggtcattcttcatcaacacaagcatgcagccttggtccccatgttcaccctccccgaggctcactttctccccttctgtgaaatgagattataaagtgactttcccctcataggactgctgcaggatggagagagacagggaacacagaggaatccactcagggcctggctcctgcacacccaccacggtggccttgcttttagtcttccctgtctagtgaagaatccctttacatctcattagaatccaacacaccctctgtgcacatgcctgccgcccagccccatcagctctctctctgcgggggtccttttccaggtgcagtagacagagagaaagattcaggtctcaggtgctcccaggctggggcgagactcacctgtaagcagattgcaacatgaagtagtgacagatgtttgcccagagggcctcgggagtgactgtctgtgcctgggggtattccccagggcatatgaggcagaggcgctctgatgctgtaacacacacagcaaacatgtacagagtatgttcattcttttttatcatatatgccttcattttccattcattcattatttcttggttatctaccatgtgccaggcacagagaagttttgcaatatgggaacagccctccattcagaggaagtgacggctcctgacggaggggctttccctgcacagggtcactgccctgcccgcctgtcctcacagtgccaccgtgggcctgaggctgcagctctcactgaggttcgtgccactggacagtctgcctggctgattcctctgtgttccctgtctcgatctccatcccacagcattgtcctactcacagcaccaaggacaggactggacacgctacaggtgactgaaagcaaggccgccatggtgggtgtgcaggagccaggtcctgagtagtgagttcctctgtgttccctgtccctctctatcccacagcagtcctattggtcagtcctgttgacagctgtggcctttggtgtggggagtgctccagggcgggtgctccagaagaggtgtttcctccctggcttcagggagcgctttgtaggagagccagagatggctgcacagaggccattagagagaatggacattgtaagcagagggaaggatgtaagccaaggcacagagggctgcgctactcagggtggcgagggagcaggacggtgccgtggggaactgtgtgctcagaagctaagcccagacaccagccccagagggctggcctgggaaagccaaccagagtgtctgagcgactctcattccctttggtgccttagcctgagtgttctgaaggcagagctgaggcaaaacagtatatgtgagtagtttattccggaacatgaccccgtaagcagggatgagggaaggaggggcaaaagcagcagatgcccagccaatcgaaggacacaccatcaaattcaccactgctgtgggcaatggggctccaccccaggacccctctggaggaccccgtgaaatgactccaaattatccactctggagaaggaaggctcctccgctgttggtcaggctggccccaggacctgctaagtcactgtggtttaagattgcctggcagcacagattggccggctgcacgggactatgctgcagtctcagaccctcctggggaagacgcgaggggcttgtccctgggcctgacctcctgcctgctctggttgcttctgtatggactagtcaccacctatgcagagtggtccctataaaaaggcttgagtctgagagttctaagttgggcacgaaagcagatctgactggggatttaaggaaaagcaaaagccttcagccccagctgtctgacatgggtctttgccgagggctagattttcccaaacttggagccaagcattccagggcaagtaactgatttgggaagtgcaagggagacagggaggggactgagtgaaggatggcacccagttaagggggtgagactggggcaattgataaactgggtgactgcagcttaatcccatgagaagactcccggaaacaagcatcccaggcttattcccctctaccagaggcgaggagctggggttcagacccatccatggtatcttacaacacaattgccaatccctccccaaagtccctgtccatcattggttgggagcagctcccaagggtataagctccctggctcttggggcctgccatgagggtagagtggctttctcaagttttggacaaagctctcagacacaggaacgcagattccagctgttctgtccagtaaagcccttgatccaggcctcagccacaggacatggaacaggactgctgcaggctgtcttgatggccaggagaggccacttgcaaacccttgctccaagtcctcaacccgggaaatcgcccttctgttcaacaagcacttcctatgagtctctccctggctctgttttggttttctccgcagccagcagcaccctatcaggcatgagagtaaatgtttatttgcttcttggattatggtctgtctcccccactgatctgatcagctctccaaggacagggattcggtcatactgttttatctcaagtgcctaacacagtgccttgtccgtgaaagatgctcacatatctgttgaatacaggaaataagggaaggaagaactgatgcctgagattctcggagactagctgtcaatcaatgtagtctcccggggagaaatgcaggtctcttgccacagcttagcataagtgtcttcccttggcttcccctgggccctagggctggcttcccaaagctgctgttcagtggcccatcgggtcgattcctctaggcaccatcacagccatttccagtacagtgtgagtcctctgtgagtcccggcaggtctgggatccatgccccggcccgccttctctatccaaccccagccccacggtcttgcttacacatagttggtggtgtaaagtcacggcagtattcaaaaggttaaagcagagtgaactgttaattttaatgctttctctaagattcagttttaataagcgaaaatgatgttcttatttgcagtaaagtggtgttataaaattctgtctgtcaagatcattttaaaaccatggaaataaatgatctgacaaaatcaggctattagacaagtgaggaagagtgatttccataaaagtagaggagctgttccttaatttcacacttggtagtcttttgggtcgactaaatttttaaataagtgataaaattatattagcgcaattgcatttttatagatttttttggtcattgtactctttttcaatccctttattttaactcaaactgttctgctgaaaggttactctcaacttatgttaccccataacagtcttcagcccacgacatggcctgaagctcgcaaatcctcagactgtccaggtagggtccagtcgaagcatgcgtctgagaaatggtcgttccctgctaggcacatgggctggggtctgtggtcctgggtgcagagggagggcagggaggccactgagggtatcctatggggctgggagctcacctgtccctgggtatctgagctcactcaatttttgctggaaataaaaaaaaaaagagaaataggaggtcatgttctccagaaaccctcattcttccaactcaagatgctgggtgtagacggcagctgtcactgtttgctgaaggagctgcatttagggaagaggagagaatggtggttcttttgtgatccatcacgtgcccaccctctaagaaccctcaaatcatcacatctccagcccaggccaaggattttgtctcagtcactaggaaaatccttagagaaagcccaagatcccaggtctcttgtgggaccaaaatatcactgatgggacagatgtgggcccagttgcgcgggagagaggaacgcttccaacttgacttttcatcactagaacaacttctatgatgtgcatctttcatacttccttctgctctgccctgtgctgattgtccaggttaattgttcagagggcagacatgggcctcctgcaggctcagcctcagccctgagccatctccagggcccagctcaggacctggggtctgcatccctttgctgttgtgattttggctaattctgagacccagccagcaacttctactcccctctgcatcctgagttcccctcttgctctgtcctgcccagtccccccgcccaggtctctgtcagattcaccatcctcgtctatgtctggtcatctcttgtccgtggtgccctgcctaactaagtacagccagtccggtgatactacataaagtgtactttggcaaattaccgcccctcctcttcagtggtcaggtctgggttcagaatctgagacctggggctgtgcagaagctgggagctcagccttggcatccacctgatctctgggctctgtcctcctggcatgcactgaggaactctggctgacaggctattctctgggcttcccagggcagcagctttttaaaacatgtactcatttccaggtagtctttttccaggaaaaatatgaagctccttagtgagagaaaacgcacctttgttgagcatctactatgtgccaggcacagggctaggctggcagagtgcagtcaatttgtttattggacaggaagggtgtggcgctcacttgggaagcacagctctgggaacaaaagaacattttgtcccagttagagaatggcctcctcttcctgaaacccaagtaccagggaaaaggagaggcaggctgtgttagcacttaggaaggcactgagcttgaactcaaaggttgtgagaatccattcaccacatgcatttttaaaattatgaatttagcccaagttttctcagcaccttctgtgtgccaagcactgtgccggctcctataatattaaatagaaggccaattttgaatgcggggcgtggtggccagggaaggatgcctgcattctcctagaggacctttcaggctgcactcttggctcaagagtaagagaagcaacctggaaacttatatcctcctgtgcttcaatctccccatcagtacaatgggtgctcagggtgcccaagggctctcccacccctggcgccctgtaggcagaacatctgtggacattaagaagccaagaactgcaggctgggtctgtgtgccctctgccagccactgaacactgctctgatattcaaaggagcatcttcagaactcagaagtcaaaaatcacattctccagagtctctgagaggcaatgcctgagcttaggggaatgttaaatttccagtgtttcctgcaaaagaggaagaagcaccgataggcaaagcccgaggggtggccttggagggacagggctgtctctcccaaggaaggaataaagaagtccaaattagtcatgttgtattacttctttttatggcaatgctctgaaagtctgcaaatgtcagcatgttaatttactgtcactcagtgatattatttcatcctttcaaaaatgtgtttcttgcattttcagtagcatactccaagtgttctccatctcaaagtttctatagatagtgcgactactttcactctgaccgttgccaaaatgtagaaattcatcgttgactgcagccacatatacgttacaagtggagctgggactcgggtttcctgcttacagaaaccgggggagaggtctgaattttctctgtgttcttgttctatcacctcttgtcctccaaaagtactctgtggtttctctctcaaggcacgtgcagagataaatttcatagagagatgttaagccatcagtcacggctgagtttgtatatgaagtcggaaccctccctgtctgcgagcccagccccctccaccccaatgattctcctatggtggcaaacttatttcaaaaattctgatgaaacactttgtaaattttgttattctgtgatgataataaatcattatagccttaaacacttctctagcttggagcctcagtcacaaattatcttgtcattctgaccaaaacattctccaaaaaagcttgacaagtgctaaaacccagaacatgaaaccatgtgttgttgtgaaagcaagattcagaaatgtcaattaattagattaagaggctacttttagctttacccgtgttgccaaataacccttaaaatatgcatagcagtggaaatctacctccgcggtacagtacttcagtgctgagggaagacaatggctcggactaatggacaaaattgttgtatctgtcagtcagctgcaaagaatgatctagaagcaaatgtcttgcttctttttccacaatgtgatttcacgagctgggtaaatgctaccatttatgaattcgaagagctcccccctcccactccacctcttaaaaatcatacacagatcaagaagaaaaagtcaagtcgttttcatatgtctttactagtaagataggtttttaatgtctttctgtgcttttttttaaaaaatttgcatttgcattttgaagttcactttgtaaaaaaaatatataccgtggagaaattatttaaatgtttttttatccctgtttcttgaaaatcttatctttaaataatctatatcctcaattttatttatgccataaactgttcctatattttaatggtctgtttgctttaaaaggggttgttggttttaatagctcagttgctatctttgtaaactaaactccttctgacgaaattcgagcagatcatctctgcctgtgagtggaaggcacattccaacccctgaaaaggaaatttaagccaaataaatgttctgcccaaattaaaatacataaaatgaatagttaactcggacaagagctgatggacgcaacagttgggctgcggacatgtgggtgttgagagcgctgactgccaggcaggacctcaggagagaaaacccagatgaaattaatttcctgtaaccccctttgtccattcctcaggactaattgatggcagtgctggcacggacatcttgggtgagcagaaatgaccagggcagacagcatcgtgaagggtggtgtgggtctctgccctgccggggtctgaagatggctggctcagaattgcagcctctgagccaggacttggaggtcccggaggacagggacaggaaactctcctccaaattctcaaggccgttgaacccaccttgattatattagaatccatgtggattctggcactaattttaggacaggtcattttcatggaggaaggacaaagaaatggcagggggtggggagtgtgggcactggatgagaatcctatgaagctttgcaaagctgcatggagatgtgacagcagcccctctcctcttggcattcataacctcgccacccgctgcccacggctgccccccagcagcgagcacgaggagctgcgaaggcatgaaggaaagctgccttctccccagctggagtgcccccgtcctgctggtcagggcaagacgtgccctgtggcaagtgggggacttattgggggagggacttcctgcatggggccacttcctgcatgatgtcattttgtgcggggccaagagaggggggacagtgtgccctgcagcaggcttccaggtttccatgtctcacagatcctgtgggtcccccccactcctcacatccccacccctctcagccagtcccactgtttctagctagcaatgaggcaattaatgagctgtatagaggccctaagttatctctggaactagatgggtaataaccacataaataagtaaataattaaataactaaataaaataaaacggatgagtgaggcaccagagctctagtctccatggaatgagttgtacggggtagcagaaacagtgggggaggagggggaggcccatagctccagccttggctctgccactgacatgaagtgtgtgaccttgggcaagtcactcctccttgctgggagctctcccacccgaccaaagaccccatgtagaataggtgccaataggagtgcagtggggagatgggagcatgaatggtttaaatgtagcaggaggcaggggtatccaaatggcctcacattccttcatcttcccggtctgcatctggccaaaaccttcctcctgcaagccctatgattgtggggacatattccacctgtgcacagggaagccaccctcagccagtgacaggcaggaggtggtggaccatcagctgccttatcctggggtggggccactcaaagatgagagtttcctgcacaaacctgcagaggttcctggggaccaagtaccagtggcctacagtggcagcttgctccttaatgcattgggaattagcttcctttttttccccatctgcctcctcctccctcctatctgaacgttccaggctcccttgtcaaatgaactacctgccctcaaatcctcacctcagtcccgcctgtgggagagcccagcctacaagacagatagggaggagcagggcccagggccagccagagagcggatgtcctgtctaaaatgggcggctgctgcccggttccagccacctgctgtcatgcaggaatgtggcatccggagatgccagaaatctcactgttgtatgaaatctcccaatcttcaaagtttggcaatgaattcaagttttgtgggtttttctttttttttttttttaagccgtgtggctcaagccaaacaaatcggcaggtcatattccatccatgggtcacattttgcaacctgtgccaggtaaaatattcattgcgcagttcaggtgccagagacagggccagtcaacgaaggttcctctttctagtaaattctggtctgcagccataacagggtataggaagtcatgatcaaaaggaccagcagtttttgggcagagaggcccactctgactgtggggtaggggtccccagctataccttgtggagagagtggccaggaggttctcaaggtcagcatggcccaccctgtacacttctggcccaaggaggaggagacactgcctgccccattaggagaacctgctcccagtgggtcacaaaaatcccatagccggctgggtgcagtggatcatgcctgtaatcctagcacgttgggaggctgagggaggtggattacctgaggtcaggagttcgagatcagcctggccaacatggtgaaaccccgtctctactaaaaatatgaaaattagccgggcatggtggtccatgcctgtaatcccagctactcaggaggctgaggcaggagaatcacttgaacctgggaggcggaggttgcagtgagccaaagttgcgccattgcactccagcctgggcaataagaacaaaactctgtctcaaaaaaaaaaaaaaaaaaaaaaagaaagaaagaaagaaaaagaaaagaaaagaaaagaaaagaaaatcccataccttggtttctcatcaggattctccctattgtaaattgaagtccttgaatcaggggtgccactccttgaggaatttgagaaggtcatactagggctcattccccctttagcaaactgaggccagacattattcgagatgcacagagaattacctaccagccctttgcatcccggactggaaccctaaacatatggcttgaacctgaccttcaggcagagccaggcctgctgctctgggcctgaaaacaggtgggaacacacctactgtcactattgtgaaaggaagcccctttcccctgaaggttgctgagccacacaaggatgggtcacccacaaagggaaaagtgcctgagtccaaggcagagtcagagcgaggtggggtgctgagaagggtggaggggcaggttcctggtgacatcactgagcacccatgtccagttgggcctgaagccccttatcctagactacagtcacatgagcccaaatcccttccttttcttaagatcctgagcaaattcctgctgacagcatcttgacaagcacccctggcccctgagcctggagaggaacaggtgtcctgtgagttacaggttctgcagggcagtggagagcagtgtttgttaactgggatccaccacaaaggcctagaggtggacctcagggagcccatgtccccctacacttaagcatcttaagcaacacttaagtggtgcttgcatccactttctcctgaggagagagactgtatctctcaaagggcctgcaacccctaaaaggtcaagaaactggtatacccagcctcatcaacataacaagaccccgtttctaccaaaaaataaaaggattagctgagtatggtggtgcatggctgtggtcccagctactagggagggtgaggcaggaggatgacttgagcccaggagttcaaggctgcagtaagctatgattgcaccacttgaagtccttgaatcaggggcgccactccctgaggaatctgagaagttcacactggggcttattccccctttggcaaattgaggccagaaattattcaagatgcacaaagattcacctacgagcccattaacacgacccttttcatcccagaccataaccctaaacacacgacttgaacctgaccttcaggcagagccaggaaggcaagagagcaacaccctgtctccaaaaagaaaaaaagttgtggtataaagttctaataaatccccatctgagacacacgggaatagaataaaatgcatttatctctaaaatggtaatggtgatattttgctttggacgattcagaaggcactccctaggatgtgacaagtgacaccatgagcctcaccatctcaaagcagggccagagggacatctagggaccaagcccctgtggtttccgccaaggagagggccagccctccaaagccctcccctctctgcaagctcaagtggcatccatccttcacagtacacctcgggccctgtccggcccaaggaagtgctcctggccggcccacttcaagtttcagggtttgagccttgcaatttcactttgttttctgcccaatcgtgttcttcattcactgcgtgttgtcattgacttggcatgattgtggactacatacatgtctcctctctccagcttgactccaaacttatgaaaggccaaggcaggtcttaggaattttcttcttgttcttgatgacaacacagggcatgagggccttctctcagcctgcacagatgagatgagagctcacccttgcctgagaattgtgcaagagatgagagctcacccttgcctgagaattgtgcagggtccaggagactgacctgggccctcacatgtcttgggggaaagctcctcagaccctctctcagaacaaaaccataggacctccatgttcaaatgggccatggtggtcaagtcccttgcaggccctgccctcactcattctctaggagtctggaagcgccctcaatcccccaccactccttcccctacccgtgtccccagagcctccatcaggcccaagcacaaggcaccatctcctcagcatctccttctttcccctgcccccactccatccacccttcccccatttctttcaagggtctctctggtgggtgcctcatgtctctggcttttagttccatttaggagaataagcccattttttttttcctggacttcagaagctttttgtccccactcgccctttggaagggagtcacacaggggtgagggtagagggcatttagagagcagaggctgtggccaggatatcagagcaccttctcctttgggatcattgccaagcactatgctgagcttgttgagaatggggatattgaaaacatttgagaaagctgagatgagaagctggagagagcagagtgaaggttggggtcatctgttcaatggtcacacctttgacaagtgcagtaagaaggcaggtgatatggtttggctgtgtccccacccaaatctcatcttgaattgtagctcccataatccccacttgccatgagagggtcctggtgggaggtaattgaatcatgggggtgggtctttcccatgctgttcttgtgatagtgaataagtctcacgagatttgatggttttataaatgggagttcccctgcccatgctgtcttgcctgccaccatgtaagatgcgcctttgctctttcttcatcttcctcaatggccgtgagacctccccaaccatgtggaactgtgagtccattaaacctctttccttcataaattacccagtcttgggtatgtctttattagcagtgtgctctctttctccctgggaccacccactggtgcagtacccccaggaaactctgggttggcagggtgcctctcatgaaaccagagccccaggagacccaagccctagtctcactgaaacacaagagccaaatgtcaaactccttccagaaccatggcccttttggagataggggctgggagggttgggtaaggctgtcactgggtggatgctccgtgtttctaaagcttctgaaaacagaagcctggctgatcttcctgattgacacagtggggcccaggccaggccactgatcccccaatcctcatctataaacaggcatcacagagattacagccctcttccctcctaggatggctggggagaaagacacaaaaagaaagtagtgaggtgagcttgtgccacccgagaagaatatcaggacatgactccttgggttgaaagcaatgtgggagaaggcctctgctttcttgggttgccaaaatataaggaaggacctcctgtacaatcttggctggaaggcttgctagagagatgagctctgagtctcacctttacggctgcctccccgggcaaatccatccatgtgccatttcaacacagggaggggaaaattcctgagaccccagttcaacagacacagtctcttgtaccccaagctcagcgcccactagagagagggtgggttgggcaaagtgaggtccccacaggtgctatccccagtaacctcagctgcacggagcagcccctgctgcccagcaggtccacacattgcaggaaagccgccttcctctatctccagccacacgcacttcttcctgagggctgtcatagcagcccttcaaactcatttgactgggttgcagctcatcacactgtcaccaactcagttttcattaggcggctgcttctctgttagcctagccaagcagaagaactcaaacacatgcacaaattaaatcgacatccaaactccaccaatatacaaagcaatttaaatgatactcattagagcaatgacaagccctgatgaggctttcaggagccgggtccttcagcttttgccgactcggtttcatggtcactgaggcggaagtccggcgaccgtacctccattttttttaagctaagaaaatgactccttcccgacagacacacctatctcattctctctcttttcctcccagctgtctcttggctcaagtttacccagccctggtttctggacacaggtatggccacggacaagagagtcacataaaggaaaaaaaaaagcagccacactgacttcttttttccataaatgctccaattaaaacagatttcagtttctcataatttcatttcacttggcctgggagatctctaactcacaattatgacggtcataaatgtgtccctggattcctgctgtggaagaaaaaaatgaaagtgaaatgttgaaatgcagtaatttaaaaacttaacccccccaaatttaagaagtcatttccaaagtcccatttatgtattttaatttttaaaaagaaagcaggatggcctcccccgctgatgcctggggcttcaaaggccaggacagaggcctaatggggtctgcagtggtgcctgggcagggagtcccagtacccccgcatggaggctgacagccacgccagccacggagccaagtctgtctccaagtcattgggtgcaaagaacagcacagggaccgcctgattcatcactgactaagggcagagcaaggtcacgactacatccatcagatctgtgggctttggagtttgcagcctagatcatatccacagcagggagaatgatcggcaacttcatacaccggtgcctgtacttctgtttataattttatgctcaaggttaattatgtgtgtccttggctttgatcagagatagtagcatgtgagaatgttgcctgtgcccatattggcaggataaggatttttagaaatacccatgaactggaaacacacttacatcactgagatgtgagctcttacccaggaaactgatttgtaaatcatggtatagaaagcattgtccaatgtccagtggaaatttgttggtttgtttgtttttgagacatcacaatctgcagcctcaaactcctgggctcaagagattctcccagtcctgcctcccaagtacctgggattacaggtgcacgccaccatgctcagctaatttctattttttattttttgtagagacagggtctcactatgtggcccaggttggtcactatgttgcccctggcctcaagtgattctcccacttcagcctcccaaagggttgcgattacgggcttgggccactgtacctggccttccaaaggaaccttctatgatgatgggaatgctctgtgcctgctgtccaaagagtagctgctagtcacatgtggttagtatgattgactgatgaactaaattttaatttaatttaaatctggatagccatatgtggctagtgtctactatattggacagcacaggttagaaggtaagtaaatgtatcctacttcctgagttggctaattgtggatgttaatctctggaaaaggatcacctttcttatcaccttaatcatcaggaatgatttattaagaatatatcagtacctgacattatacaaaggttgcagaaaagcagtgtctctgatctgctatcattagaatttaattcttttaaaacctggatttttggaccagaggtggggcactgacaccccaatgctgagcctccagaagccgtggacttatctaagttacccctggtgtccacagcagtaccaagactgagtcatcattagactgcctggtacggctccagccttcatggactgtcaggccgctaaccaacaatttggctaatctattgtcttggcagggcaggggatatagttctgaatcatccagcgctttgggatgcaggcccttggaaccatgaaagcccaccagttccagggttcgctggcctttaaaatcctcctgggggtcgcctcctgtcaaatccttagggacagaaaaatggtgcccgtgagtcaaacagcatctccctctggcttgtggaaactcaatggagtgtgagaaaaataagcaaactccctggaaacaaaaccctgggtttgatcgctgctctgcagtgacacccggaatccagccctcggctgcaacaaagctgccacacggcacgcaggaaggtgaggtcggttctatcacagaggagcttgtcttccctgaagctttatgctaagacagagcgctgaagccctacccaaatgagccagattatttccagagctaactatagtgtattttgcagaggccggtgagccctggcactgaatggaggtccaagcctgagcaccttttctgtgttttctgaggtcagctgaatgctgaaaggcatccaccagcacagggtcccagggggaaatgtatgttcaggctgcctttgccaaagattacacgtgctcactaataaatccccagggagaaagaaggctcctgtttccattaccaaaagaataactatctggcagagtaaagatggtaatttctccattagctaagacgataatagctattattttaaagttaaagtatttattattaaagagcggtgttggagtttgcatgttttcagtggtatgattgcttcctctaatacaaagtgtattattttcctgctaaatagtcaacagaataaaacgcaattgcaattttccaatctcaaaaggactgtggcagatgaatttgagaaaaaaaatcattggatttatttaaaaaaattttttttattagatgacttggaaatgtctaaagatgatagttttcatcccggacttgttcgatgcagcctggcttcccgtcagctcctgtctctctgccactcacgggtttctgtcttcagaattctgcttccccaagatggagctggacggcttagagggccttttttcctctataagtattttgtcaccacgtctgtggaactgtaggtggccagaggctggggatcagtgaagtcacctagctggaatggtctgaacttgaggaaggaaccacagagactgccgccctgaactcagctgggaaggctgtggacacacaacctctgtctgagcgcagggcagagaagggcctgtttggtggttatcaatatatatattttttccttttgcagaatgaaaatagaatagagatgccagggagattgggtcctcatcataaccaaccctctctaacttacatgtaaggattttggttaattatagaattcttgctgcctaaaacttaaagatacatcactgatatttttgctaaatgttgactgcagcgaattgctaagatgtggcatattgatttcttgttgtgaagtgagctgttcaagctccatttaagattttcatcttgcatgtagccctgagcacatcatagcaccataaattagttaaattgcacatttatcacaaatgttattttaagatactgcgtacatgtgatggtcggaagatatacagtaggactgcagcaagccggggcttgggcggggtgaggtcagggtcacccgcgcacctgtgattaaaacctccctcccttggcaacatcccccctcctccctgcacccatttaaaggcctgacttgggcgaccaatgccttcctccattcactctctcgcaacagcaaccgcagaacatgagcactacgacagacgcggagtgcgactttacaacttcctgtcttatctcagggaaaccagggccattctgggctggggtgaaaggttcttccggacagtggcccaatctttagccaggcaaaggtttggtaacctcaggacaaaatggccctgaatttccaagtagggggagaccgtaacaaaccatatccgccatgctgcctggttcatggggttgttattgtgccacgtgaggtttgcattcgtgcctggagccctactgcccaattctgatgtttctctagaggtaaaattaattcatggacccccacgtatatgagcagtcctttcctggctaaacgcccaaggtgtcaaacaagcgagagaacctgcggcctaccttggcttgtaaatcctcacaccaacccccaaattggaaagcccagaagatgatcctgggagtggggtgaggagatgggcaaagtgtgtcgagtcctcccaaactgtcaagagcggggttccaccgtcactcgtacaaatcccatctcccttcaagccacatgggccctggtggtgatggaagtgttgtcagtttaatctgttagatgcaggactttggattctaataaaccgatgctatatttaacctgtgaaaaattcaagcgtggaaatctgggctccaggatgtgaagatgcggaaggcacgggagggaggatgtctctgtcccctgagacgcattctgtggggagctggtcctggagggaaacatatgtgtcctttagctcctcccaggtaaaggtcagtaggacaaagaacaggccagaaaagaaccagggccagccacagagaagatggggcctggcacaggccctgcaccaggaggggaacctgctttcttccctgcctggccgtaaaacccacctgtgtgcccacatcccaaggcaagagcttagctaacacagcactctctatttgccaaacaactcattttaaattgtagtgagtttctccctaaaaacccggagaaagatggaatgccgagagaaaacagagtagacagaaaaatttggactcctcttgagaaaaaggggtggggatgagcggaaaaaccgtaggcgtgttgccgaacatctctgaaagggcttaaatttttaataaaatatgtgtttttttttttaagttgaggtgttttatgtattacatggatgtaatacatctctcatttgtataattctaggttaggagctatgattctgcataactgcaagagtagtttgaatatagtaataaaggtattttacaattttacatgatgttcccagcgttttgttggcatgatttgccggggctaataaaagcttgtgattatcatataaatgctctccccctcctcccatggatgggttcagtctcctcccacaacacccctgcctgcttatctgtggctgttttaacacaggagggagaaccttgggaccccaaagtctgtctgacccgattggttctgtttcccgctgtttgaaaatcctgagtcaacaggaaggagtcaccctttcaaagctttctttcccatcagcctccttgacagtgcagggccctgaaccccgggcatccagaagagagatcaaaccccagacccccatgcaggtcaccaggtgtgaccggaagctctgatcctgggggtctggcaatatcccttctgcactgagcatctaaccttataggcatatcttcctttcttgtgaatgtttattctcggtgcagatcctattcgagctgcctctgagtaagtgctccctgctctccaaacgccaaagttcactaaaactccccctgatttacgcacagcttccgactgccagcacctggcagccgcagcaaccagctccgtcataaacagatcgcatacaatttaattttaatgtgctcgttagtcgtagcacatttcagacataattgtgaacgcaacacaaaattatagcaaaaagacaattttaatgctgccgtagaaaaaagggttatatgaagagtcacataatggtgcttcattgtcaacaaccaaacagggcacagagtgtgttacggtgtctgtgctgtttacatgccaatattttatacaaaggttctcatatggtgtcagctgtcagttacttctgcaaattaactgccaaaaatggagaagaacagaatcacttggagagccggtaaccacgggttacctttcataagcctaaagataaagctgcagtgtgggatcttgggagaataattaggaagaacaaaacagaaagttaccaattgaaatagaaaggcatcctacaatatggaatagcaaccaagagggcttataaataagtgaaagaggttggatcacagaatgcctcatgacttttaagcaaagtattacagtacaaacattttaaaggctttatcaatgtttaggaaatacagtacaagttctttttttttttttgttcttttttttaaccttttcaaatagacttaaccctttgagcactgagtttattttgagtgttctttgatttctaataaatacctttaaaaatcatgtgcaaaatagttctgatgcctgccagggatgtctttcccggtctcgtttattcagactgctcaaaacaaatgacaatatgatgctaataaatatgtataatttaaacatgaacctctatcaatatagatgtactgtatagcaaaacaaactatcatactttgctttcagataatgtttctgtatactttataaatgctatctgtggtatcttctgtataatttacaatgtttgcatgtaaaaaacaaaacccatagaccttaaaaaaaagaaaaaaagaaatatacactatacataggcacagcttatgcccagagcatagcaggtgcataaaacactgttgctataaatgcaagaaaaaggtcatttaaccacaatcacattttttttcataagagagtctgaaatctatacaatatatacatctatgtttcaatgtgaaaataatattcttttaaatttcaaggcgtgttatacccctgcagacctgcataaatggaggttcatattattcattataactaagctggtaaggagtttaaaaaacagagcttcatacattattattattttattttattttttaaccaaattaatgcaaaagtgcttcaaagtactcagagggctaaagatgaaagggtgagaaatgccagcacactcgagtctcgtggaaaaggtgtgcctgattccgttataaatgcttaattaaactgtctgttaatgcatgcagcttgaagcatcgggaggatgctcacaactaaatcccgtttacacaaagttccaaacacttaccactgcattttaaccttcatattttaccagtaacaacagctgattatgcacctctattaaacactgtacagttatacaaaacagtccagcccagagtgattctctgcagttaaaataagaacatgtgccaagaacaacaagtcagagggggcctgaaggtgccttccacagtttccctcaaagcaaactgcagtcctttctatcaaaagcaaatgctactgcttctctaactcagagacatacagaaggtggtcttccggagatttcccgtgtgttttgctaaggtgaagtttaacagcgtgcttgctggcaaaggtccgattgcaaagtttgcactgataggaagtccccaggtcttcctcgggggaggacgtcaccattttttctgacggtgacttggtttgtgctatctgactgttaatctgttcggtggacagtttggataagtcccgtagccggaagcctaagtgtgactctaggtgactgatgtacgtggaaggagtcctgatttgggacgcacaatcgttacaaaagaagacggggtggccagtgtccaagtttttgaggaactttgttccacctgtccttcgaagctggtatttcacgttggccagccagtggctgatggtggtcatggacagcccggtgaacctggagatatgcatccgctcctgggggctcaggtctgacatgatgtacttcccttctgaggtctgccggaggctggcggcaaactgggcctggaggatcaggaggtgctgggggttccagtttgactggcggcccttcctcttctgggcgggcgtcgactcctcagcctcctccagagtggccccgtcaatgtcagacttctcggagatgctggaaggagtggaggattttgacgtgtggctctctgtcaagttcttcagcatatcggatatatctgacaaggcattctcgcgtagcggcgagtttgacatgaatgatacgacggcagatgtctttgccgttgtcaccgtggatgaggaggttgccggggctgtggacgtgggtgacagaagcactgaacccaaggagcagcctttgtcactcttcccttttgtcaagtctatgggctggtcgttgttgacgtggtagaaatagcggtcgaggtggtctgccttcttggactgcaggggcggcggggtggccacagcagccttctccgccaggctgttgctcatcttgaaaagcatgctcatggggtccagggcaggcagggagggcttggcggccttgcccaggtgaatgttcatgactgactgcagggcgctcaaagggttaacaaaaggctgttcaggcgggtggtcggtgatgatggccgtgctgccactcaaactgctggctaggggcttcaccagctccttgccattctccaccggctcagcgagggggctcccatccttgcacccatcccgcggggggctggggctgttctcctggctgcggaagcccccatcgctggatgcctccatcttgatgggttccccgacttcgctgctacatggggagggagtggcccgcttgggcggggaaagcttcccatccggctccttcatcttctcctccactttggcaactttctcagtgacctttttcaccagctcctccatggcatgaaagtttgtcttgggcatgggggacgtctggctgctgggtggagagaccagggtctggtttttcgtcggggagacaatctcactgttgccaaacatgggtttcaggggcgtgctcttccccgacgagcccagggacaacttcatcatgttgggaagttggtaggcggcatggatgctgggatagcccccccagctaggagtgccgttctgggccttgttgattgcggatgtcactgtgttttccaaggatttgaggatatcaagcccccccttgggactctcttctaagtcattttcagtcaagtaatggtatttggaagagatgtcacacttctcctcttcttcgccaggcttgtctttttgcttaggtttctcgtcagtgaccgctttctccttgtcgacttccttcttgacctccacattcagttttggggagatgctggcaggtgtattggagggggacgtgaaggtggtggctgccaggggcacggactggaccttctcatccagcagggttgtgatggtaggtgtgacaggcgtctccacaatgggcttcccctttttcatagcagagttggtgaccttgatgaagtggccagtgaccatcatgtgggcagtgagctcctgcagggtgtcatgcgagctcccacactccatgcacttcaggatctgcgacttccgggcctcaaagtgccatgcatagctggccccattctggtggccgtaccgattatttggcgtgatgtaagggttggagttcttctgaagtgcatcgttggtgtctgagatggtggctttgggggttccacctgtggaatctggggagctggggagctccagctccagggaagctttcttccgagtggcagggatgattttggcggcgacaggagtgacgggttccttcagaggcactttttggtagtgttttgttttgatcatatggacactcaaatcctgcagggactcaaaggagtggccacagtacatgcacttcagcaccttctgggcgtcttccttcccttccatttccagcaaggagcgtttgcgaggcttggaccagcgcttggggttgttgttatcggtctcatggttgtcgtcgcggtaatgccccgtctcgttcatgtgcaccgtcaactccaccagggtgtcgtaggcagcgctgcagtccttacagcggaacttgctggcccccgtgaagatggagccatagagcttgctgctctgccggtacagctgcacggtgctgaagaggctgggctccgggagcatgcggctctgtgacacctgctgcagcgtcttagccatggcgctctggtgccagtcgaagctcccgctgccacagctgctgctgctgctactgctgctgctgctgctgccgttgttcttctccgaggagggctggtgcaggttgaggttgaggttggaccagtaggagttggagaggaagttgttgtacacggccttcatctgctccaggctatccgacacagtcgtgtcttccagtgggaccgtgacctccttggtctcctcttcgttcttgatggagccgctttcaaagtcagccattcggtcactggtctcactgatgtgtgactcgctgtccatttcatggcaggaaaactcggcggccggggagttctggtagctggggcaggccctggcgagctccttctccgggcacatgtacttggccgagggctctccatctgccgtatgctcctctgggtctaaaccttcgtccaccagggcagcagcctttaactcttcggaaacataggctgccatgataacaggtgggaaagagagacaggtaggatggaatgaagagagacagggagaaggagagaaagaaaaaaaaaagcattagtacttgttgatcttacctagaatatgttctgggctctcaggaaaacacagcaacccagatgggtacatgtatttgtaaaattaaacagttaaaatgtggtgtttctttggagcaaaaaaaaaaaaaaatctgctcttcaaacataatttgccaccttattcttctcaaggggcaacagcttgaaattaaaactaaatttgaaattaatgaagcacattctggaggtggcattcatttctaaagtaataaattacttgtatcaacctcagagacagcagttcctgtctgtcaattaatatgtcttatgcttctcctacccctaatgcatttcttaacagacagattcacaatttaaattaagcaagcattttttactcattacatttttgaggctcaatctttaataaatataaagtataaaaacatcaataaaatttttaccaagtaaaaagaaaagtacgtccattgtaataagggaaaaacaagattttgtggctttttttttttctttcttccttctggaaaagcaggtctcagaaaagcttagaggtaggtttcctggcagggataggtgtgggttcgttccagttgagaggaaataccctgaccagctaccacccagcccccagccctgtcccccatgtgaacactcagccgttctcagccacctgtgcacacacactctccatgcagaattatgtcacaacaagttcaggaaaattggtatgcggtgctcattcctgatgtataaatatatacaagaccttccagtggaccttacaaatgtcaaagtgtttgctctttagactactttgtcaatatttactcagtataagcttcatgggcatccaacagagatcctgtctttctggaagcgatgtaactgggatgtaaatccagcatgcattcccacgcaggtggagggcaggccacgcgcctgcaggttctggaagatgcacgtccagagacacagagcccagagaatacttgcgttaatgcaacagggtgttttttttgtttttgtttttgttttcattctcttgcattcggtgacttgggttattccttactaaactgatctgccactgcatactgcatcagggtagttttttggacagtgaggagtggccagccctgtggctaggaacaatttcaaggtaaaggaaaaggagaaataaagtgactttgtcctgtcagcttctaaatacttgtttgcttcaaaaggccagtggggaagtgtgttaagtggttggaacgttgcagtgctaattgcaaggctgatttctacaaaaagctcttaagaaaggaagggaagttttgtttgtggaattgactccaccagctttaaagatttgcccctgttccatttcacatcagaaaaccaacaacaacaataaacaaacaaacaaacaaaaacagtgaaatgagtcccttgaagtcaagcagataggcccccctcattccttccaggacaggtgtgattcttttgctcctaagccccctactttgagtgccaagattcctaagccaagacacatggaatcccaacactgatgtaatgtgaacttggatgggaactgccccaggtacacacatcagctgcagggagggggatacttctgctcatttgccaactactaagcaagagtcttgtccaggagccatggatgttctttacaaatgaccagaagagagtgccctgctgcagtcagctgagtgtgaagtgctgtggggaacctcaagtttaaggccatgcactttgagatgacaaataaagacagcaaaagctctgttcctagggccaagaccaaatgcttagggaaatacggcgctggccaatggaggctcctgtgctagccacagtgaagactgtgaatgcatgtgttggaaaagaataggaaaagaaaaagaaaagaagacatctcactctccctcacctgccccccgacagacttcctcggcatgcagcacattctagaaatctggactcaaaactccaatggagtggcaggcctggaggaagaacagccgaggtagaataaccaagtgtcccaatttgcctggagctgtcctggtttcagcactgaatgtcttgcatcctgggaatttactcagtcttatgcaaactgaaggatggcttgttaccctagctggggcacacagtatgactgaggtcagagcatccaggtgggtctgcaacctctcttataatcctctcggggaacagctggagcagagtaggctgggtttagctagacacagcccactgtctgcagaagtgcaccgggtgcatgcatatatgatgtttccatagtacggttttattgtaaacggggaaagaggaggaaatcccatggctggtgtccctcccactgagactcaaggaaatgcccaggcctgtgtagatgggtgaagatatcaaagccccttctgtcctggagatgcctcttggagccacagtctgcaatacaaaccccacaccctggggattttgctcctattacagtggctcccatgaaattaagtctgagagagaaatggccccacagcagccactacgagaggacaccagcagccagaagcagcagagccaatagtggacatgaaagagtcctctgtgggtgaaggccaccaggtgagagggaaacccaggggctctgccagcccacattccacccaggggcaatgcatctccccatggccagagccttccccacccccactgcacaagcaccaaaccagcccaggccgtccggagcacccctccccaacacatgcaccatgaatgatatgaccagctcctctcctgggctggcccacaacacgctctgatatgctttgtaaactacacagcagggtcagaatgtcatcagtctgatgactgaggaggaaattaatatggaaagaaaaggccaacctctcaacctccctggtggaacaagatccaactcagaggagaattaaaaggctctggtgccaagcagaactgggtcctggagagacctggcctcaccgcacaccccactcctgaccatgtcatggtttctgagggttctttcaagcgcacaccctcgtggctgtgacgtgggcctcactccctgttcaaatgaccattttcttttccgatctgaaggtgagaagtatttccttaggtggagcctaagacttttacccactggttctcccctccacattaaaataaagggaagggctgggcgcagtggctcattcctgtaatcccagcactttgggaggccaaggcaggcagactgcctgagctcaggagtttgagaccaccttcggcaacatggtaaaaccccatctctactaaaatacaaaaaaattagccagacatggtggcacatgcctgcagtcccagttactccagaggctgaggcaggcgaatcacttgaacccggaggtggagggtgcaagtgagccatgacccaccactgcactctagcctgggcaacaaagcaaaatcctatctccaaaaataaatacataaaaataaagggaaaattcccatcttccaccatgctttgcaataatttcactactctgagaatatttatactcttgattactgaactttaaaaatgttctagaaaatggaaatggacccagtggaatgagggaactaagggatgaaaggcactccacaaatacgcatcaagctgccacaggcaccaggcaggttgccgcacactgtgcagtgcagagttttgtttctctaggcctctatttccttctttgaatgatacggggcacttgggtaatatttgtaacgtccttcctcggctacatgtctatcattttatggcctttcagagaaggtaaagagccgagctgtaaagtcgcttaatctggttcattctctgcaaacgccaacctcaccaacactcagcaagtggagtagttcctctgtgctttcttctctagactgagcttgacacgcaaagcccctggctggatagaaggaagggctctggaagctggcacagcgaatgccctggatcaggcaaggaggggaggaaagactgggtgttcccagtcactgtgcagatggtgagaagtcaacaggggtgtggggcagggctgtcgagaacctggtccccaccaggctggcttcagtagcccaggggtaggcaccgtccaccgattcgacccaacaatgcatcacatgtgaccttgggaaattccgctactgtctccaacagtatttgagagtatttaaattccttgttgctacttaactttctgtgcattcttgcctgaattctctaagggagggaaccttacttccttagtcttgcatgcagtagctgagcaatggacagctgctgcctcatttcaagtaggtgagtggggggtcatgtccaggagcaaggagttgtaacagcctttgttaacaggatcccccattctctctgcagcctcccacatgggcccagtccagccactagcatctctcaccccatccccaaccaactccctgactccagccccagcccctttaatctcatctccaagcagaagctgctgagattaatatagaatatcaggctggtcatatcacctccccatataacaccctcagtaacttcccactgggctcggaagaagatccaaattcctcaaagcagccctgaaggaagggagtcctccaccatttgcccggttcccctccagcccctctcagcttctgagatgcaccaagatctctcattccttactttctagcactgcctcctctgctggaaaccctggggcaggtgcagtgaagtggagaatgcgggaacccacccttccccgggcctcagggaaaaggctcttggggatagcagggttttgaccccagcttttgtccccttatccatggggatcacttgtgtatggccagatattccaacacattgtcagctttgtgtggtcaggacgagaccccacacacccacaccccagttatcagccgcaaccctaccgtccggcccagagtggccactcaatacatgtcaatgggacgaatgaatgaatgaatgaatatcatagacagctgcttcacacttcctaaatagctgccaaaacatcctgaatggatcctgagtccagccagtcccagtgcaaagcagatgtgctggggtgagacccaaagtccatcctaggcaagttctgtctgagagtgactggcacattcagcaatgccacttcgtgattaaaggtctctggggtagacaggatgacagaacccaccaccaaggaagatgggaggagacaccccagtcggtggtctccttgcattggagcctgcccaagctgtgcccacactcaaataccctcttcaggaatgcattatcggccaggtgcagtagctcttgtctgtaatcccagcatttgggaggccgaggtggaagaaatgcttgagcccaggaattcaagaccagcctgggcaacacagcaagacctcatctttataattcttttaaaaattaaccgggcatggtggcctgtgcctgtagtcccaactacttaggaggctgaggcaggagcatcgcttcagcccaggagattgaggctgcagcgagttaggatcacatcattgcactaaagcctgggtgacagagtgattctgtctcaaaaaaaaaaaaaaggaaaagtaggccaggcgtggtggcttacacctgtaatcctagcactttgggaggccgaggctgggagattgcctgagctcaggagattgagacaaccctgggcaatatggtgaaactccgtctctactaaaaatacaaaaaatcagccaggcatggtggcgggtacctgtagtcccagctacttgagaggctgaggcacgagaattgcttgaacctgggaggtggagactgcagtgagctgtgatcgtcactgcactccagcctgggcagcagagcaagccactgtctcaaaaaaaaaaaaaaaaaaaaaaaaaaaggaaaagtgaaagtgaaagaaaaagaaaagaatgcattatcatccctctatccctcttttctcttgagcaaataagatgggaacctctgctgccagctcccatggaggaggcagctggactgtgagggggaggaggttctcattcaaaccaaaccaacagctgcaaagatgcaaagaagcacacagaagtgatcagggactagcaagtgagaggccgactgggcacccgcattccacgcttccccaagtccctccattgaaagagtctctcaagatgtgagcccctgcggaatggctgcacccgcttccccacacacatctcactttccttaccccaccaatgaagactgtgtgcttaaagcaacaagacagccatcgatctctcaagagctgagtgccaaggacacatttccagacaactgcctgaactgaagaacttggcatgcacagaaccaaatgtgactcctgggtagagacacacatggatgagaaataaaagctcccaaagttacaaaagctttctgcaaagttctatagcccaacaaccttggaagcccacatgatggaaaaacaaaaaaacacaaagacaaaacacggatcctgcctaatatgagcatgtttatgagctgtgttcacattcacacattcattgcatctggtcctctcaatggtcaaggaaggtggaaaaatcatctccattttgcagacaaggaaacagggattctggctagttccacagcacacttgcactgaggaaccagttctgaccccaagccctctgctgcaacccctcgggatgagtcactggaggtagatggggcatttgcctgaactcctaagacccacacccggggtccagtgtcaggggaccacacaggaagtgtgggagggagcgccctgtccccggaatgaggagtgggcagccacgcagaaccttctcaattcccccattgggatccacacctacccttccaggagggtccagcatccccaccctcagctcaccagtggtgtggctttcacaccgtggatgcagggatgacaaacgtatcatgtccggggagagaagagagctggcccaccgtggccatcaagggtctggagacaccaattcgttaatatttattgtcatcattaactaaattcaacctctaggtaaaaagaaattaatatgtgtcatataaatataaaacagtaagctggggcataacggaattcatttctgggcaaggtggaattactttcatcacacagttaggaatctctcccaaaagataaagaggaagtgttggctgggacctgcactctccaaccacgggggccacggatgggcaagtcgtgggtgggagggggcactgggtgtgggtggaaagaaaggaaaagaaagtatggctgtgtcccgctccccaatgcaatttccaagtaaaatgccctgtgagagttagcattttctgggctgaaataaaggttctgaagttataaccctccgtttcccctgggaaggtgctttgctggctaaaactgtttatagattccttttccgcatgtcttcttattacggatagcccagaagaacacccctctttgcaatgagtgcctctggtcatccatccataaggagccctgtgactgtgatggaggaaagagtagagccaggagggagaggaagaggcagggaaaggagaagaaaggaccgaagagggaaggggccatcaagtcatccagggtttgagaaggggtcagagagagaggagggggcccagcagagagaggacagagggagaaagagagatgggagaggaagagaagaatccactagggctggcgtaggggagagagaggccaccaaagggcatgggaggtaggaatggagagagagaacacaggtaatggagatttgagaagagacaaggacaaaagaggttattttctggaaaggactctatgacaaagagggcctggagcctgtgagttctggtacagaagtggccctcaggatggccaccaaggtaaaagaggatggacctaggggagccgctatgggtccattccaatgctggggcctccgggcctcctttcctcctgcttccctgaatactcagattttcaaatgacagagggtgatttctttttctgttttttttgagacagggttatgctctgttacccaggctgaagtgcagtggtgcaatcacagctcactgcagccccgaactcctggactcaggccatcctcccacctcagcctcctgggtagctaggactacaggcactagatacctcgccaggataagagtgctttattgttttttgtttgttaatccttttttttatttaaataataatttaactagccgaaggggatggaggaaggatgatggcttgggaaggtggctgtcaggtgtgttttcccaagcaggctctccaggactcatgcacaccagtctctgcagaccctcctgccctttcctcagagccagaatcaacttcaacacatgcctaagccctcagcaggcacgaagtcctcttctctgctgcagaatgtgcttggacaaggaaaaatgccaagaggctcacaaggcatcttgaccacttctcactccccacttacctgccttcttcacacttgggcccacaacagagcagaccccaaggaaatggcaggaggagacaggaggggacagttcaaaagccatagcaacccaatgtggagagccgtccaagagggcagtagctggactctggagaggacctgccgattctctgctctgtcgcccagcctggagtgtagtggtgtgatcatggctcactgcagcctctaactcctgggctcaagtgatcctcccacctcagcctccctagtagctggaactacaggtaagcaccaccatgctaattaaaaacaatctttttttagagttggggtcttgctgtgttgcccatgctgctctggaactcctggcctcaagtgatcctccagcgtcggcctcccaaagcactgagattacaggcttgagccacggagccaggcaggatctgctgtttctgcattggatttttctctgggaaacaatgtgatgttaggcagggaggccctgggtctcagcttctgccctgccatggattagtcctgtggctgtgatgactgacttcacatctgtgagcatcagtttcttcatcaacaaatgggaggaaggaatgggaagatgcaactggccacatccgcctcccaggtgtttgcaggcaaccaaggatttcataaggagtgggcataaaggacttttctaagttaaagaaactctgcaaatagaggtgcaccaactgcacaggggctgtgctccacacagctccacacagaaggcctcctgctgtcgggaatctgggaggcacggccaggggatgacccctaggctcacccctcctcttgtaaaggcctctgggtctcccagaccctccatgctgacctcatcacaaaaggaggaggtggggggacaagcaccaagccctgctggggtgagagctcccactggggcttgggttctgtccctcctcactctgggcagccttaaaatgggggctgcagaaaaggaagaaagccagacagaaaagagaagaaaaagggagggaaatggagggcaaggaaaggaggcaaggaaggaagagatgatgtcagaagcacgcctgcagcattagtgttcctgaccaagcacagctctcctccccgggccccagcccctggtaaaggaattctaggaaggtagcgggcaggaccatggattcagtcccgctccatcccactgcatggatctgactggagatccccagtgccccactcccaggggtggggttcggagccagatgccctgcagcacggttctggctggggcggcacctcagacactggctctcagattggctgccactgtccctgtagcccctagcccccaagctgggccgcgttctcctccaggctgagcccagaccccatgtccgctgggcttctgccttgaatcaccttcctctgtgtcagggaaagagctcaaagtccccagaaaatttcacctaaatctcagcttattctcaatacacctggaaaatctggatgaattgattcatttgacaaaagaatatctgcttgacaaaggactcatggaagtgccttacacgctgtgccccctgggttatgcttatacagggctctctgctgtacaaacgtgctgcacaccttgctatgatgaagcaaggggatccccttctcaggggaaccacacctgccatatcagctgtgtctgacgccacccgatttagggcctagagctatccccagatgtcctgaggtcccacacaatgggctgctcagaagcagctgcccctagacctggcccagagccctggtgggtgtgagggatagacagacagggaggaagctcaggcctggattgccactaaccaaacacattccccctggccctcagagaacatgacaaatcaagatggaggtgcaccctcctggctcttgaccgggaggggctcaaagcaacagtgtgaaggcaggacttcctttttgtgcaaacagagagaggagatggcagggggaagtgtgggatggaatggagggggcttagctaaacacacactggggggtaccaatatgcttggattgcatgttgggcttctgtctagttattaaataagcagggagaaaaaaagggttctagaggactgtttatacctggtaccgaggaggtgacaattcagtggggaacacaagtcttctccatctatccacctgggcacccggagtcacctagagacgctacctaggatgatggaggtcatggcctctagggacaaagagaaaatggcattcttggatggtaccagggagaccaggggccttccaggcatcgctgctgggctttggagctccccagaaaccaggggaatacccaagggccagaggatccagaagggcatggtttggctctgggggaaggaaaagtggctgcagctgtaatggccaggacttctgcagaaggctggccatggcgggatgacaacctcccctagattgattgctcttcccactagcaaggtcaggaatattaattttgtacacgctaatttgatgtaatgtgtgagatgaatgcttgttcagttgggtatccctgtgttaataaagctgcaatgctttcatcccaagaaaagcatggcattagctgattggtgaataaagtcagtgtgaataaggaaacaccatgctttagcacagcccgagtggccagtggtggcgtaagccaatgacaggctgcggctgctcctctagggaacccatggcaacgaggcttcccagaacacctcctagctgctggaagccccagccggttcagaagactcagagcccaggatgagtcctgttcctccagcggtgatgggaaacaagagtccaagagttccagaagccaaacctggggctcccaaaactgagttaagaaagacactgcctgaagcttctttctttgaattcttgctgcaatgaaagaaccccattgtaccaccgtctagcagctcctccccagaacaatctccctcccttcccagcactcttcatgagggggatggctcagaaaaggaggaggccagaacgtcaggaagctctccaagatcagaaagagaaggcagcttccctgtctctacaatgactctcttccaatgccttctggggagcttgctctgctgcagttagggcaccaatcccagtacaaacaaaaataaatgtatcaaggaggcattcacaggacaaaaaccactgcctcagacaaatcttcagataacaaagaataaataaatactcactttggggaccatctgagtcacctactgtccttggcttcaagcacatttaaactgactgggcatcaaaccaatggtggaagcccgcacctgtctgctgtcatggggagtccatacactcactctgtgtgccctggaggagtgcttcactgctgaaatcaccttaatccatttaagctacagggcagagtcatcattcagccagcccggtgctgggcccatatctgggttgacagcaatcagtttgtcctggtagccagcgacggtctatacagtgaaacatggcttccggagccagggtgcatttttgcaagactggtaaaggaagtaagctgcctgtgggtgccgtattcccattcctctttgagttcaatacatttccaagcacactgccctctcagaataaagaatccagggtctgaacctcttcccaatgtcctttttaccttttattctacaaaagccatgaggtaaatcctggcctatattggatccaataaattagaagagtaacttcatccaaagaaaggattctctcatcttggtggaataggaattgggtaaattattaggggcaggggatgtgcttgaccttctcaaattgcatacatgagcagagggattctcagggggtagctgatgtctttaacaaggcagttcattgaggcagtttatggaaccaaggaactcttgcctgcctatacacttggtgatctaaaaacctgggaaaagcacagttgagaattgggcagcaggctgtgaaaatttgggaacagtccttaaaatgggcctcttcaggtggctaaacatgtacaactcaaactgtcactgggacttgctggctttcctccaaaatactaaaagagctatatccaaggggaaggtaaatggatggctaacatgagatgggagttaagatttacatggaagacgaagcaactgattcactcaacacatctacccatccacccagccaaccctccatccatctacccatccatccatccatccattgaaagacttattcatctatccatccaaaaacctatccatccaaaacccatccacccatccatccatccatccatccatccatccatccatccacccacccattcatccatccaaaaacatatccatccatccaaacacccatccattcatccatccatatatccctcatctgttcatctcattcttctagccatcccaaacccatccattcaaaaactcatccatccatccacccatccatccaaccaaaaacccatccatccaaccaaaaacccatccatccaaccaaaaacccatccatccatccatccattcaaaaattcatccattcaaaaatgtatccatccatccaaaaatccatccatccatccatccatccaaaaatgtatccatccatccaaaaatccatccatccatccatccacccaaaaacgtacccatccatccaaaaatccatccatccgcccacccacccatcaacaacccaaaaacccatcctttcatccaatatgtattagacactaattatatactccagatgctttagggttaggaataagtaaacaaagtaaatagctcagaattacaggctatacttttatgtactcaaggtggccttggttaaacacagagcacaagggcattagagaatcatacatctgcacaaatgtcttagctcgatattcaaagcccaggttaaccaagccccactttaccttctatgttttattgtccactgccccctccacacacagagatgctagtcttccctgataactttcctttgatcttgccttgattgatgctgtttcttccattttacatatcatgcttggtcttttcacattcccctccctgtcctccaaggtcctgctcattccatgtcccccaggaagtcctttctcacctgtctcattgaaagtgatctctttaatttctgtgatgagacaatgaatggaaaagtcccctctaaactctaaagcctacagaaatataagaaattatcagcatcattgtatatctcttctggcatttatctcttgtagttttagagtcgctgatcctgtgcataaattctctttccatatacactacaggagcatttcttacctctgtgccctttgcatggcctggcatgacaactgtactcagtaacttctggtccaattcttttagtttggatggcgctgcttaggctaagaaccaacaaagaccaagggtcacttcaggtagaagtttccaccaccttcctcaacggctctcgaatgctgggctgagaagtcccacgtgctctctgacttcccatgcatctcttcattcctcattcccacgtcacagaacagagacactccagtaagaaccagggccaccagggtatctcagttctggcgaagttcctcatcttatgaccacaaggaaaacttggagagaagatgttcccagtgacctcagaaaagtttagccctaccctttctgcactgagcacctgcatggtagccaccatgactaagtgaccttcttaaggtctgtagcactgcctgcattgagccaggactgatccagcattcagccagcattgacacagtattcagccaacactcagcgaattctcatccaggactcagccagcacttagccaacactcagctagcactcagccagcactgacccaacactcacctagcactcagccaggactcagccagccctgacccagcactcagccagcggcactcagtcagcacttagccagtactcagcactcactcagcactcaacaagcactcactcagtattgacccagctctcagttaacatgcacccaggcctcactagtgtgcatgtgaacactgtttggatggacagtgaaaaaatcattctagcctgcttgaaggaacaaaggtaatggtcaaatgtttcaatttttaaataattttgactgacatatacatgcctacagatttcaacctcatgtctatatattaaaacagcttttctccaaccaatatataatctattgactggttggcatcacaatatatgtttcctcttaagtatcccatctcacatttttatattgacacttatatagtctgagttgggtgtttcttatgctagatcaggaacccttaacaccttaccatccatcacaaggaagagagacagaaaagagagagagaaaagaaacaatataataatgagaacagcactctcactaactggttcatgccttgcttgccttcttgtggagaataattttgtagtatatatcaaaattgaaaatatctacactctgacccagatagcaatctttactacaaaaacattcatacatcatacatagcccctcaacaataacaaaaaaacccctctatgattaagggtgttctcatcagtatttcttagaataccaaagaagtgaataaacaaactaaagtatacccatatcatgaaatactatgcagcaactcacaaggacgataagacagagataccagtgtcagagaagatacggaacactggaactttccagtaccaactgttacaaccattttgaaaatctgtttgtcagtatctacgaaagctacacttacacatactctgtgtgacctggcaattctattcctagatctagacccattagatgtgcatatgtatttcatcaaaagacctgtacgctgatatcctttgatacgctattcacaacagcaaagcaactggaaaggattcaaatgtctaccaccagtagagtgaataaatacacagtgtcctgtccacatgctagagtgccatgccacagacaaaatcaactgttattcaaaacaacatgggaggatcacagcaacaaaatattttatgaattcatttatgtaaatttcaaaatcaggcaaagctcacctgtggtgttaaaagtcaggacagcagttaccctttggaggtggtggctggggaagggctgtggaaatcctggaacacgaaatgttctgcctctggacctgggccctggaggcacaggtgtgttcacctggggaaaattccacctacacttatattcgtatgctggcctttttgtatgttattctgcataaaaaggttctttaataataatttcaactttggggttcagggggtacaggtacaggtttattacatggccatattgtgtgatgctgaggtttgggctatgatggatcccatcaccccagtagtgagcatgatatctaacaggtggtttttcagcccttgcccctcgctttcccccactcccatctagtaggccccagtgtccactgttcccatctttatggccatgtgtacccaactgcttacaaagtttaaaaataatgataattctctaatttctcatatgaggagatctctaagacatagcagaaggtaggaaaagaaaataagtctcacaaacacaaacatgggtctctgttttctgagcaagtttgtgtgtgtgtgattgtatgtgggcacccagtgaaataatcctggcctggatattagcagctgtcctgcagatggaggaggcagatactgttgtggggaatggcatggagagaggaaggggaggaaacgggtgcccttctgcaccgtctggaatgttcacaagcacaccttcatgaagtgctggaagtgctgtgaattttttttttttttttttttttttgagacgaagttttgctcttgttgcccaggctggagtccagtggtgtgatctcggctcactgcaacctctgcctcccgggttcaagcgattctcctgcctcagcctcccgagtagctgggattaaaggtgcccgccaccatgcctggctaattttttgtatttttagtagagacagggtttcaccatgttagccaggctggtcttaaactcctgacctcaggtgatctgcccgcctcagcctcccaaagtgctgggattacaggcgtgggccaccttgcccagttagtactgtgtcattttgaaagttataaaggaatttttatttgtagcatgcacctcctgtgtgtcaggctctatactgggcaccgtcagcctagaagacacagtgcctggtcccagggagtgggcatttggggctgcatgcctgggagtcagtggagagtgggttctggcactgggggtcagtcacaaaggaacaggggcctcaggtgccagctccacagaatgccaaagggcctgggacagctctccagcctctcacctttgctctcttccgtggcagcattctcagcattctaggtgaaagtgtcacccacagtgacaacaaactatgggaaaacagagacataggcaaactatgtgctgcagtcctaattttgacctcagtgggagcgggaggtgggaggctggaagggtgttgggaaatacccaaagcatccagggggcatagcacccctaaccacaggcagggtcttgtcccccattgtgggaatcagcgggtttcaggtctgtcccttcctttcaggttcaggcttgttgttcgaggccaactgcctcctccactgggcacagttctcagctccccgcatcccctcagaggatccctcctgcggatcacgtcgccagcattcccaggtccctgtggtggactactcggggtaggcgtctgtgtggcaggcaggacaatggagacagatgtgcagtgagacctctctgggccccacccttctgctgtgaagactgaataagataactaccaagagtaagggtagcttattcccttcctgtctcttttttttgcccattcctaagaactgcagaaagttctacaacctcgattttctaattttttattttttttaagagacaaggtcttgttccattgcccacgcaggagtactgtggtgtgatcatggctcacctgcagccttgaactgatcctcgtgcctcagcctcccaagtagctgggactacaggtgcacaccaccacgcctagctgatttttaatattttttttgtagagtcagggtctagctatgttgcccaggctggtcttgaactcctggccttcaactcctcagcccctcaaagcagtgggattacaggcatgaggtgatgcacttggcctgaactttctgcttctaatgcaagtgctctagaaacacacaggcttggagaggacactcaaaataaaccaggataggtacaacccccacccatttcagctgccacttgcttccctggccatccctgccctaatgcgtactcacaggtccagtggttatgctcctaaaacccagctgtgaaatgctcaccctctgcagagagacctgctactggatcagcagacatttcctgagaaagggtcagtgggccaccacctcgggcgcagggatagagctgtatggagctcctgcggcctcctaggtcacctgtcactcctcaggaggtgctcacggacctgtgagatttgtgtctcttggcttcccttgcacccagggaaggccactctagggctgctcatgtgaccaggagcatttcacctcccacaacccagctgatgtgtcacatgaccaagagctttgctgtccccgccatccaaagcccattcttctcacctctgcatccccatagccctgcagaaaccctacagctaggcagtccctttttcccagtgggctgggtaggcaagggggtcccagccctccccatacagagcagagggagggctctgcacaagccagatactcagtcaatttctttgaattaaatcaaacttttaaattaaaagttgaccccatagaagagccgacttcatgcttgttctttttgtttgtttgttttgttccatttccttgagacacttcggcaccaagcagcatttccgtaaagaattaaaagcccagaaccaattgtggatgcacagaagcctcccatctacctgcagcagtactgtctgggaacggtcctggcccattttgtggggccttgcactcctgggggtaccttctgcacatgatcgctgcccagctataaaccagcccgagaaggagcgagagccgtccatgggctccatgtcatggatgaagagactgacgcttagagagacagagaataggggatgaggacacagaacgaggactggaattgggaaaaaaaagcagccagggcttttactgctggatctcactgcctgtctccagaatacacgtttaaaatgtactacttaagagtgaagaaaccgagagaaggtctcctgattctttaaaagcgtgacacacagctgggcacggtggctcatgcctataatcccagcactctgggaggccgaggtgggtggaccacctgaggttaggagttcgagtccagcctggccaacatggagaaaccctgtctctactaaaggtacgaaaattagccgggcgtggtagcgggcgcctgtagtcccagctactggggaggctaaggcaggagaattgcttgagccccaagggcggaggttgcagtaagccgggatttcaccactgcactccagcctgggtgacagggcgagactccatctcaaaaaaaagtgtgacacacaaccgcatggcgactctctctgaccggaaaggacagtaggctggagtccggccacgccaccttggcaaggtgtgcttggtgagtctgttcatctctcagcctcagtctccccacttgaaaaatgggacaatatcatcacctcccttggagggcacggggagacacaaactatgcaaggtagataaagcaagaaatgtcacacgtgtagcaagggtgcccagaaccctctgctggtcgcaattgtgggatgcgggtgtttttcttcttgatcaagagggaaagtcatttttatttaatctgaaaatacaaatagaagggccgctttctggatgtagcaaagcctgaaagtccatgaacaccctgtgacaaggttatggggtgcaggggagaagtcgggccctgggtcagcatcccttgaccatcatggattaatctgcctgtgctccaaaggtccccgtgtccacacatagcaagggggctcaaacgctgccttacagctgtaagactcctactgtgcaaagttctcaggaccaaaaagaaaaattacttcgggggtctctcactgactgggtccgggacccaagtctctgaggctcagggcagccctctctgttggcagcctcttggaggggacagtaggaacactgtatcatcgccactgtgaacacagaatgtcacatgagcaaagacacttgtcaaatgcctttcctttacacgcaccctcaccatgacctgtgttaatgaagttaattgaatttaagatcaataatggttaattattgcaatttgacattcagagataaatggctttaagacagagaagtatgtgtgtatgtgtgagcacgcgagagagtgtgtgtgtgtgtgtgaattctctccaaagaaggtgaatgcattacaagcctaagagggatcccacaagccttccattgattctggtacattgtgatcgacttcatcctctgataaatgtgggcttttcagagctacaggtaaatgttctacgagactactctaacccttgtcactggccaaatctatacgtgctgtacaccagaaatctattgagatagattaaagaactgctgtagaaacaagagcagcttcaataaaggtgaaggtttattatattgactattaatgtaacttaactgtatgcagttatgaatgcttatagatcagggcagtttaatttggggcagttggatatgattataattgaacacaaattttttttatatcaccatagatgaactcaattcaatgtggacaaaaagaaaaaaccaacctagcttggaaagtagctaggttataaccaaagggtgaattcctagggagggatggccccaggagagctggcccaggtccaggcctctctaacgatgcactcgccgcaccacctcctgctccaggtcccacagcgtgcatggagctgacgccccagcagtctacagtggccccacaagcctggggtcagggctgctaagtggctcctctgatttgatccaaattggtaagaagtttaattttcaggagagattctcggtaggaagtcacagccccaaatgcattaataatgacactcctccatccacccagaaccagctagatgaccacttacaagattgataatgacaaagtaaatgttgtcaggaagaaagtcctactgattgcggagcactgacaataccgtgcgcctgaggagttctgtcaaaatgtaagattatgcaaaaacaccgttgagaacactgctaatcatctgcttgtgtcaattacttgaagggtctctgacagcatatttacattaaacacatttcaggagcaaaatccttaatgctatatcagaatatttttcattaccattagcaaatctttaaaaatcgttttttcccccctcggctacaataggagtgatggtgagacagggaaggctgggtgggggcctatgtgggtggagtggattgcgggggatttcagttcatccctctgcaaagaagcgggtggtgcagactcagagatggggcatccccaccacgtctccctctcagggcagatgacagggccctctctcatcccaaacaccttccaagcccagtgaacagcagcattggttttcttcctgttggtgtagccagccccacacatctaatgccaggctatttaacagagcaaatgacaggtgtacagaggcaattattgaaattaaaacttagatgacatctgctggggctgtgcactcaaacacctcgccctggtcacgccgtcttgtccacaattatggcaacatggacataaccaaaataaacagcccagggcctgcagtggctgggctgcctgagacatgcctgcgggaaggcactggccctgtgctgggcatcgtcatagagcaggagacaccccggcaaagggattccgcaaggtccaccctcaggcctcccatggcaggtcagagagggtcgggtcagaaggtgtctgaggtgcttggaaaaatacatccggatttttccggacatgtttgccagacatgacaatcatacttaccatggtgatgatggcagccagcatgcttcgatttttaaaatgtttgagcactctgctgtacgttttacctatgctgcctttggtaaggcacaccaaaggcccctcatacccaccccatgaggtccacaggtggagacactgtgtcccagatacacgtctgatgaagtggaaaaccggcatttgaactcaggtccctaggcgcctgttacattccacaccctggacatcttagttctaatgcttgtgagctggccctccaagatcccagcccagtcagcacctgaagacattccttacactcagaaacgcaggcaaaggggcccttacataaagtttgtaaagccccagcaccaccttaatgtggcaaaagagagagccatggtgctgagccatctgagactgccactcacagggcctctccaggtctagggtgcacaggagtgacccctcagtgcatgagctgctgccaacacttcccaagggctcagaggcccggagctgaccctccgcccttgtgatccgtgccctggaaacatagagccacagactctgcccatgtccaggaagaaagacagcacggtgtgtgaatgggacataagactccacatcatctccaacctactcaataagaaatgcaccatacatgcaaaatcagaaagtactcacacctgttcataagtggccagcccaaggaatccagtacttgtggtcattttagaaatctgtgtaagttacatgaaaatttaaagcaaaatgcatttcttttaagaaattctatattctgaaagttttgttttctaaaatctgtctcttgccattccaaacatacagacatttcctcaactgacctttataagtgtgcttttacttttaccttaaaatacttaaaaactacacacatacaaaaatagatatgtctatatataaacacacacatatatatgcatttttcctatcagagtgtgtaggttaaaaaataatgcaaagatgccacattcatcctcaaattgcacttccatatgggaagtgagatgtatactgaggagaccacagttcaaaacaggagcatctggaagccaaagggtctagctcaataaggccaaaatttagggtggattcagcatggcccattgcttgcttggtggaaataagatgtcacaggtaaacaacgtggcttgagttcatctttagttttaatctagattacatgtacatgtatgtgtaaacatatacacatccttatgcttatccataaatgcataaacacacgcccatccacatatgcacaaatggacctctgaatgaatctgatagccctacagagtcatctttcaaatacgtttgaacaaacaactccaaacaaagctacaccaaatgaatgaatatactgggcaaaggtggcccaggctaatgggtggggttgacaacatcagattcctaacagccaagccttcactccggcaaatcgccccccatctctctgggaagagactgaagatggtggagctgctgacccgcaggcctgagtgttgtaaagggacctttctccactacgctaaggaatacgcccgggtctgcactgcgacattggtcgtgctgcaacacaggacagagacggcagcctctgagatggcatagacctggctcaccggagacgcacttggtccacataggcacccacagtcaccaaggtggagggctcagctcatgatggcatggaccacttgacctgcacggggcctgcacagggcccatctggcacctgaccatctcggtggggtggctgagtggacggaatcactcaagcatgaggcacagaatcactcaggagtctggtgggtgctggtacaggctctcatgccccgaccccgccccatcttcctctctcctctgttggcatttcttcccagcaaggtgtcaaggcctcacaggccagatttctaaaaccccaaagcccacaagtgacaaagggcactggcaaaaagatggcacccgctggctgcactgtcatgggatgagccatcggctggtgccagcagaagcacatgggtctcagaaagacggatttttttgcaaagattttattttattcaaaataaatgctagctaccatttggtgacatggatcctgactagggccaagtgctattccagggccttcccagcactaacccacacaccctccacaaggacttcatgaagtcctcactcttttttttattttcattttttttttttgagatggagtcttgctctgtcatccagcctggagtgcaatagtgccatcttggctcactgcaacctccgcctcccgggttcaagtgattgttttgcctcagcctcctgagtagctgggattacaggcgcgcaccaccacgcccagctaatttttgtatttttagtagagacggggtttcaccatgttggtcaagctggtctcgaacttctgacctcgtgatctgcctgcctcggcctcccaaagtgttgggattacaggcttgagtcacggcgcccagtccgaagtgctcactcttacaatttgcctttcacagttgaggactctcagaaacttgctcaaggggactgggcaagcagggccaggactgaggcctcactgtatgcctgtggcccccacacccataactcttcctctccacctttctgggggccctgcctctccctctgcatcttcagctgtttagaaaaagaatctcccttccccaaactgtcaaactgggaccataacaacaacaacaacaaaaaattaatcttgagtttttaaaatatcaaaacctgaaaatgtataattaaattaatcatcataaattactttttagcaccgagagttggatttatagtatcatttccaaacctctctgtgagatttaaatattttatagcatatgtgagttagagggaaaagtgtctgagggcttaaatattgctgcagagcagtagactttgacaaaaactatagcacaactgtttctaaggtagtttgtaaaaattatttatttccataccagttaattatgatgggagtctttgttgaatgcacaagcattaaaaaagtgctgatattttatgcatctttaactggagcgcgattccccgcagcgcactggtaactccttgacatttagcattcactcacagcaactgtaataaggggtttgattgcttcctttgcagacgcagtaatttaataactgtgatcagttgcataaatttactatacaaccatcttaagttagccacattaaaattaagcaaaattgtaatctgttgacagattattgctactgaacaattctactaaaagcatttcagattagcaagtgccacgagcatttgtgttttataagcttgtaaaaaaatacggcagcttcctctttccacatccccatctccagccaccccctctcctgccaccccctccacacacacaccacaaatctgactattaggcaatttcatgaaattctgtgctttctgttaaatcacctctgaactgttgatttcgttatttgaaatgtgtgtggtgaattctgctgtctggaaaggaaaaaaaaaaaaagccgcgtgtcagtttcttctttctttcttcccagtaatttcctttatgcaactttacatccattgcctttgaagggacaggaaacctcctagcatggacctcttctgaataaaatgatcagttccccagagcaaaggaaaagcactaatttcataccttagatggagaaaggtaaaaggtgcccggctccctctgagtgagatccctgcagcaggcatccttaattaaggagacaacagagaagccttcttgcttagttgctaaagaaccccttatggagtttgtggatagaaagagaagagggcacaagttccacaggcaggctttacctagagcatggtgataaagagaggaaaacagcgcccctgcccactctgtttagagcaaaatgggacccgcatctcctgcctggtgccctgtgagttgacttttcagagcaatgtttagccaagcaggcaagtcaggaataactgtttctgatacttcccagcaaatatctttaaccatctgtttacacttgccaaatatgcttccaagtttccaattttatcagtatataaaaagaatatctgtttttaaaaaaaatcgtaaatatcttgtgatgcatctttacataattcaagagaaattaaaaaaaaatttcacttgaaagccagcatgatcacagatttgtttaaactttcatttacatagaagtttggggtgggagccacaaaaagggggtaggcgcttttttggaatggtcaaatgtcaaagttgagtgccaggcggggagtgacgcacaggtgtgccctccccacgagacgacggcacacccaccgtgtgcgctcattcccggggtggccttgcatatgcagcctgtcacttcagatggagttgcggggcctctcccagacaggtgacgcggcgggctgggctgcgagcttccttcggagcgaggaccactactgagtgtgacaaattggatgggacttcactaccaaatttcctgccaagaggcctaacagtcaaatgtctatcttcttctcatcaccaagaagtgatgctacgactttgacatagtgtctccgttacttaaagatacagttaatgcaaagtgatcgcaaaacgtgaggtctgtaaaacttttaagagccaagcaaaggcggcttccatcattggctcttttatcttgagagggcacacgtgcacgtgcgtgggtgcgcatgtgcactcatgcatgggcgtgtgtgcgtatgtatgcgtgtgtgtgtatgtgtgtgtgtaaaaccagaattcctaccaggcagcacagaacctgggtctctgccattgccaccattacctgccattttttataacataatacactggagataccctgggctaggtttgtttgcttctaattataactaattatgcttctaaatatgttctttagggttacacgtgtataaaaatggaggtaggaagaaagaaaatgaatcaggattattaaaagaaagagaaacatactaattagttagctagtatactcatttcaatgtttaataatattttttaacattccagcatacgccgcagaattaaaaattaccacagcaccacctgtgcgtcccctgggacatgaagatttagagttctctcctgcagacttggagtcctcctttctaaatatttctttgactatttctttgtattccacctcattccacccccacaaattagaagccaaaaaaaaaaagatagtaaattttgttccccaccaaagccttgtaaataacatctctacaaagcccaacttaattacataactcaagtgcttgaggaaaaaaaaatgcatctattcccataattttggaagctgcctctacccgtttctatatgtgcagactgcactggctgtgtaaaaagccaagtgcccgccctgttctctcagcctgggtaggaaagagtgccattgtaccccttcattttttttttccatctgcttagtgctccccctccccatgttctgggaaggttctgggctttgtgtggcctacgatggggccaactgcatatggctggggagacgggaagatggagcggagctgagagtgtcaagaaatgcaggagtgatgacatgaggcccgaaccaccctctcacctggaaacagccccacctcctccacctgagcagcacgcggcacggggctggtgttccattaggaccccacaaataaaaccgcgtgatgaatggcaaagccaagggtgccccccaagcctcttgggctggctttcctcaaactccacttctgattgtgggtcagtcgtacacaaacaaagccttaacagaaatgttaccgaggaaataatagccatttccaatgataatacacaattttagcactgacgcttggctgatttaggtgttcggccaatgtgtcaagcagcctgccttccttaggcgggcctttaatgggtaactggcaggctctggcagccttatttctgttttagatttggtttgtcattgggtatccattacctgccattcatctttgatctctttggacaggcctgatcaaaagatgtcatttgacctactccacttggcagaaacttgtatgactctcataaaggggccaccccagctataaataaaatgacattattatttttctgtcctatcatgtagaagagacaattatgataatgcagtgtctgtcatcgggagcccagcaaattgctagctctcacgcaactgtttagctttcttatttgttttttgtctgttttcctccatttcaagttgaaaataaagcagaattgaaatccctaatgttctgcctcccactccaacagtctcggggctgcttcccatggcagtgacgtgcaggtgtggccagcagcttgtgtttgtcaatggtaggtggtggctatggctgtgctcgccaggcatgaacaatgggatcaagtttgtccttcatttaatgtttggaaaacaagctaatctctgaaattagaactgagagatattactgcaaatagataaaaatcatggcaagggtttattgtgtccttaatcaagtcataataagggaaaatgcgctggaacattcccccgacaggcaaaatagagacagctccggtgtcatcgccagggagcccacagcttggggacacaagggtccaattgtttgtcatcgtctccagcgtggaccaccactaagggctccatttctaggagactggctctcgatcctttttggaaatggaggtttcggagctctggggtttgcttccttcccaggtgttttaggctccacaggtacacaggggtagtgtgaagagactagggcagcacgttctccacccaccacgtgctgagaacctccacccaattgatgctcttgtctggaaagagagaaaaacagggacacaccgtctaagacccctgctgaaatcctggctgtgtctgctcagattcagatcatcctagagataaggaagtgactcctacagatgggcttcatttgaaatgagagaaaatgaggccccaaacagaggaaaggactgaccagaggcaccacgaggcgttcataacagagctgagaccagattccacgccgcctaactttttggtggggcccactcgccatgacaggccaccagcctgccgtcctccccaaggccggcccaggagctcagtcttctgtgagccagtgaccaccgtgctgttggcccccagggcctgcctacaatgcccagctgcctctgcaacatgggctgccttgagctttgcttggtgtgaagatgcacaccgtggtgttgcccgccaccccttgcagacacaatgccggaaggcatcgctttgtacggggccctgggttcaggacttgggggtccctatggtctctcagtgctgccatttacccacaggatatgggctaacccaccagggtgcgtgatgtaagagggtaggtggtaaaaggacagaaggatgaaagagagagagggagtagattcggaattccttgcctgaaggaggaacatggcctctagcaggcgtagatgggtggagccatatcttctgcaaaaaaaaaaggacaaaatactctacaggcgcaggaacccaagccagggcaagtcaatccccgcatggaatggagacatcagcattgaggctctctcagtataacatatgacactcatttgaggaagaacacattctcggcattgggaaccatcaagtcagcaagaacaaatattccagattagcacaggggtcaagaaaggcctggaaacaggccccgaactaagaaaccaaggtaggtaaatgaaacgtgcggataaagcatggtactttagtcatccaaacttgcaaagcattaaataatgtggcgcaaagaggaatgacggctcctaagactgttgcaggaatattattccctgaagactcagctggggcatctccactttcaggaagctgtcgccagctttctttcaccccctgggatggccacggcatccctctccatgttcccatcctgctcacggtcatttccatcatggtacccacgtcagaattacgtgcatctgagtctcatcctccacactccaacccccttgaggactgcctgtcttggtgtccctggcacctgccagcactggcttgagcaggtgcttaataaacatctgctcaaattgtttcaacacatactccagtagcctggtgccctcggaggaatttgtgatgatgggaaaatgcatgcaagtatgttttccttccttgagtttgagcgacatctccttcccatccctggaactgtggggcccattcattatgttgtcatgttgccccatctgctaagcctccactcggtgtctcaaccttctcatgtctcttccctactctggtcccaggtaatgagcctctttcctccaagctgcctctcaatggaccagaagtgaagatgaagagtcgagtgacccaaagcaaagagtgtggggcagattagaggagaaaaaccacagtcttccttcatcttcctaggaagatgtgagggtttgggggccattccacatgcatttccttttctttttggtgcagcaccgatcctgtgcactggtgtccagggtggtctgcaagtatctgctgcatggatgaatggatgaactcagggacccactgctcaggagagaatcccttccaccttcttaaaggagatgcagttccaccaatctatgacaagctggaggccacattcctccttcaggcacagaattcagaatgaatgcagggaaaggggtgggcagagtgcgggctctgtgtgatgcataagtcacaatgtgaaaggacactaggacctcacaggcctaggtccatcttctgttctgtcctgagccacagcaggacttgagcaagctacaaaacctctctacgtttctggttcttccctttaaaatgagaatgaaagtcctctcttttaagaattgttgttaatggaattatgcacataaagcacttagcaccatgcctggcatgtggcaagcattcagtaaagaacagttattttggggttacagaaattagaattttccatcagcaaggaagattcctgcagtgacaaggccaggatctctagggcgacatttcagcccctcactgggccccacccttgcagctggaaggatcatgcaatgtccaggaaactcctgcctgtgccatcagctcagcctcttgagaccaggaagggaggtggtgccacctggtaaggtggcagccaaaaggctttcagccacccaaaattctctctccgtctcaggccaagggtttcaccagtagcaagtcagacagactctgggctaagcactgccctgttttagatactcttataaaaagcagataaacttcaagcaagttgggatggaggggtctgaaggctgaagggggttattaatccacctaacactttggttgtggatttattcatcagcacttcccctatagcccactcacccccaacaaatcctaggacagatcaagagcattcgtgtctggggaggcaggagaagctgggaaagagagaaacaaaataggtgccaatgtgctgctgagctctggcctgcctcctgtcacaggaccttcttggggtgagtctcgcctgtggcctccgactgcacagggtttgttccttatgggaaggagacgtcttggtcctacggagtcctccagtacatgcagagatgaagcagaggacagaaggtgctgcactgtgaagggaacttgcccctctgcccagctcacgggctccatactgatcaatgctcagggggcatgggtggaacatgaggactggaagatgagaatcccgtttagggtccattcactgttagggtgagagatctttgagcagagccacccctctttatttgtttgtttatttttgagagagtctctctctgttgcccaggctggagtgcagtggcactatctcagctcactgcagcctccacctcccgggttcaagggactctcctgtctcagcctcctgagtagctgggactgcaggtgtgcgccaccacgcctggcaaatttttgtatttttagtagagatggggtttcaccatattggtcaggctggtctcgaactcctgacctccagtgatccgcccgcctcaacctcccaaagtgctcggattacaggtgtgagccactgcacccggccaagccactcctctttaaatcctggcttctccatgtcatggcctttgagtctcagtttccccatctgtaaaacaggcatggtgacaccaatgtttcccagggttgctaggagaggagcactggacaaaaagagtgttttgcaggctgctctgtgctgtgcacaccactgctgagaagaggcccatcttccctcccacggctggaaactatgaatcagcagatgctggcttaggtcagagaaataagcacagaaccacaaaagaaggatctagagctatgctgtccatggggctaatgactgtgttgtccatggggctatatatgtttaagttaattaaaattaaacaaaatgtaaagttcagatcctccattgcactcatcacacttccgatggggtagtcctatcggacagctcagggcagcaaattcccatcagagcaggacactccattgctggctggaggggacttctcctgttgcttcctgaaccccttggcttcctaatgtcctctctcttcctctttagaaaagacactttcctacagaaacagttattaacccttttggggctttcagggcccctttgggaagttaatcgaagtcagtgttcgctgaaatccagaatctttcagagtgtgggaggagttccaccggtggtacaagaaaatatgaggtggttcatcttgaatcacacggtaataaattactcccttgtcagttccatctttttccctctgattgcttcaaggagaaagtatccggtgggtgctattggtctttaacacctccccaacacttgctaatccccctttttaaagaagagagataaggcattagactccggtaggaaggcaagagaattcagctaggatttaatgacattgtttgatttcacggcgtttatttttatggttattttccctttatggcaagtgattctgggtcttcatttataggagtgacacactttccttttaaaaataaatttatttgagttaaaacgtgtgtaaacagtaagttcaggcagtgcatgtggtatgcagaaacgtcaaacagcatgacaggtttgggactcaggatgccaaacctgcttgggggcaaggaacagtcacagaggcttccagaggagactctgcgggaagccccaggtgagggctttgctctgctaccagcgtttgctgttagcatttccacacccgagatttggaagggaatttgtcaggtttctattaaaacctctgaatgtccagttggaggaggtagtggttattaaacctcaatgttcataaatatgctaataaaaatgtaaaatttgcagtgagccattatcaatcacagacaggatgctccacctttgaacgatggcccccatgcctggctgctgaccgggagctggaagccaagtgtgcaccgctggagggcagcgaggagtctgagctacatgcctgccacgtgcggatgtgggcacctggcagggactagggtggccacgctcctggcactgcgtaccacctgcctgttgggctgcggaaatggttcctgtccccacacatatgccagtgcctctgtgagggtgaggcccatccacctctcccagacacccaggaaacaggcagcgacatgtgacatgtgaattcaccctgagtttggacagattggtgagagtcccctgaacaacgaaatgcatggccgtagccattcagcaaacgagaaggatcctgggacttgaaggatccctgctccttgccctagaaaggccccatcggagccaagcctttcatagccatgcactaccagaagtggggtattatcgagaagggtatggcactgagagtccgggtacctgcatcctggcaccgacactcacttaccaggctgcaacctgcagcacacaattggaagtctttgcgccacagaatttcacttgtaaatcaggtaataccttcatctcgggtaatgacggtgagcctttctctctgcctgcttcccaggtccacatttgggaaaggcaggtcagaccccctcgtgcctgcctctcgagtggctgttgggctcaccggatgcaattggaagatgcttggtggatgatgatgacatgatgacacagggttgcctcccttgtcccctagacaaccagaaaggatgcctccttccggcttctaaggccaggactagaggccttctttccctacagtctgcacgagagatgctgaggccaggccccagccatgccagcctcctttgccaagcactgctacatgcaggcaagggtgtttccagagccatgggagagagagcgggcggcagggaggcatggtcggccatcactgcaatcctgagaagccacatgggcagcggccggaaccgtgtctcacctgcacggtggggctctgcctgcacccctgcttctgcacaagtccatcccagctatctggctgctcacctccttctgcccaaccttctcagggccgggtttctgatgcattgtgaatcatttctaatgacaggatttcacatccccttgtgatactacattcttgtgcataacttgtaatttgagtgattgtgaattgttccgagtgccagattcgtattttgcaatagatcagggttttattcatatgtgagtgcataattttgcctcaagatgcgttagattacattaattaactttgtagccagaatgggagaaattaaccgtttggatgaaccttgctctgtaatcaccgtcattctcagaccccttgagtgtccacctccggggctgtctggaagagcaggcagtgaaataaaaagaaggggaaggaatttgggggcacagctccaggggaaggctcagctcatggcccctgggagaagccaggctcctgagacactggaggtgcttacctctatgagaaaggacgacgggtcctatatccctctgtgtgtttcttctaaactctacagatgcgtgctggacagatagagagcatgggatgtaatcccaagcagggaatcctgccaccaggggttgctgcactggacacttctgtcctgggcacagatcaagggaagaaagcaactctgccaagagatgtctatcacctatgctctccccgagcggccagcagaaatgtatgagctacctggaacagatgctgaaaggcgcattatttggaatatgaccaatccaactttcctttcatgatatttattttttgtttctttttcttttctctttccccttctccttcgaggctcacatcagccatccaatttactgacagtattgacctcttatagaggagattcccccagccccgccctgtcccaaagcgtccccggtctgttcatcacttgggactgataagtccatttctcctccaaagggtggagcttggctgggggtactcaggaagctctactcctgggggcggggtgctggatactgccaggtggcaggacacatcatatcagagccaggccaggccgcagcagtggggcccctcctgccctctgccagggagctgggtgtgtgcgccctagacttccctcactcgccacccagcttggatgggcaaagcactaaaaggtaaatatgagaaatacaattggaattatgataaacagaaataaaaaggggctaaaatcagaaaggttttgtgaaaagaaaaacggctggcaataaagctgaaaacagcagtgctccgaggcaatttagactgcaaaacacaaaccattaagtttgtgcattatcttttaatttaatcttgaatgatttataatccatcacgcaaggcttcaaccatatccaattattctctgctgcttgattgacaagaaaggtgatttattaagctaataaaaagtgatgtgagctgagctcatataaaaaataaccagccggacaaagactttaaagagacatcgaccatttttttttcccacagagaagggtttagtcacttttacccattcagcactaatcaagtagcaacttgggagagagtggcaaggtgtaataattactgctatataaaactagacttgcacttcgggtgggtgtgtaaggagaaggaaataaatattaaaacagatagaagaagtctgacgcccctaagagagtccaaaatgcaggaggatctcaaagtcttcagtgatgaaagcagcaccaacaccagcagctttgttttcagggagggaggcaggagttccctgctacttaaaatgcctttcccattttccagggggaaatctgcctaaatctcccaaagcctgtttgtgagaactccattgtgttttctgcagcagtaacactggaatgcttgtatgcatgaattaaaggggaagacggcacctctaaagtcatctcctgtaattgtttacctaatgctgctcggagactctggggaaaaggcaggtttgcaagatgaagtggtgtgtacgaggcctctcctcatacacaacaggatgccactttaatgtccaagatgctggcgtgtttcagtgagcacagcacttcaggactaatgatgcaatcaagcctcttgcaatcaaacagcctgggctggggaaatagtgctatttgcggcagccgctgtgtcgtgtactaaaattttctggaacagagaggaaataagaaagtaaaaaagcaaaattctaaattttcatgggggagaggaggggctgttagggaaggaaatgttcaagtgtctgctttccacctcatggaaaagtgggaaaagcagagagggaaagaatggggagagagagagagaaggagaaacaggcagagagagacagaagccaacccccgccccacctcagctcactgtacgctgtgtcactgaacagtctttctagtcgttttcccgttttatttctcaattatttgagtcacatatgctccggccaaatattctctgcttgcttttattttctactgcaacccatattacctacagtatattaagcaatctataagggcctggcaccttctatcaatttgaagaagatgatgccaatgatttgcagaggaattacaacaaagaaaggaccacgggagttgaaatttagtcgcaggagacttttttccagggacaaaattctcttctccaggatttttttcatccgtcaacaaaatccaacgggtttttctttttaccagcctccctcccctccagctctctgggcatgcccccagccccagccccagccagagccacagctgcctaggagggaagcattaaaacgctgatatgctgtagtttaatgccccagccatctctgggcagctgttccagccgagccatgccagggccagggtgtgacccactgcagccacatcgggacgatggggatgctgaacagtgcaggctcttgatggggcaagatgcaaagagctgggggaccctggctgcaccatacaacccaggacctgccagggattcagaagctccctgtgatgtctcctggtccttatgtcctcaccccaaatttactgccacactgaccctactggccaagcacagcaaggatcacagaaggcctaaggaactccctgctcagactcaagacaaaggaaggaaacaggctgtgtaattaaggtgcaccaagccaggtgtgaggagaacagcagggtctggagagcagggcgcatccccagactggctgcagctgtcccaaacgcctgccccgctgctcccaagaaggggcggcttgtcatcatgcttggctttcattaactttccttccggaaatctgacccggacatccggggtggaaagcatacagaatcaaacttcatttataaacttttccctctgcatctctttcacgcctgggtcccaggtgaccacggagctcctccaggcacctcccacccctggtaaaagggcccagccgtattgactcatttgtgtgtgaacattcggctgcaggactgtaaaagctccctttaccaaaatcaattcaaagattcaaaacaatctattgaagagttttgcagctagcttttaaaccacttataaaagacaacacacaggaaaaattaacccctgtggctctattaggaacagtataataaatatacatttaaaagatctataaacacatatttatctgcaaaatgttcttgcataaaactgttattgaaaaggctttcattttatctttgtgttattgtaattttattgaattgcttattcattctttgatattgtattttaatggtattataaatctgttttatgtctgataggagcctcattgtaaactgatataacagataatatggcaattcaccataaaaattctaaaccaaaaatgcagatcggaacgcaaagaagcactttaattcattctcggtttcttttcattttattttttaattatttttcatgtgctggttgccatctgttgataaaggatggttgtgtgaaactcactgtacaacacaataggaacttttttgtataattctattcataaaaaatgataacagtataaaagcattacacttctctagactgaggatcattagcaagttcattgtataaactgatttaaattagtcacttctggaacaaaatcctttttttgtaaaatatcttattttgggtaatttttagtatcatgaataaaagaacaaaaaaaaccactttctaaaatgtctcctattatttttatccttttattaaaaacaatgaaaaacaattatgataaaagatggtatcaacatgtatagcaattatgtcataagcccaactatggctcagaaacttcgcaggaagttcattcaataaaagtatcttaacttgccatctctaaatgatgagatttccattatcaggaacaaacgatccggtcaccaatactgtggcaaacacctagtcccaagagcagggctttatagcagctctggtgcctcctcatgggctcctcccatggcccagacaatcctaccaccctggtgccatggctaaaagcagctcattaatctcagctctgtctgatcaaggatcctctgagccggagaccagggacctgagaagttgcttttcctgggtgagtacatctgaatataaaaagcaggcgtcaaaactgtctcctgttaaaagccacctagttcattcccctatagagaaaaacaacaggacttaaggaaagtgtggatccccacctcacaacttagcaacactgcagaaacaagcaggctatgaatagcacctgccaagacggctggctcagctgcagataaaaagaagaacgttgtcaacacaaaagccttctattacaaaatagagaaaagtaggttttccttctttaagaattttgcacataaatcattgtttccaataaacattgtaaaggtttcatcagtaattttttttaaaaaaagctactcatatatatgaagatcacttggtgagacacaaacaattaagccacactgaagaagtgaaaatggctgaaaccctaaggtgagcatatccaggtctgcacagcaaaacccagccacaacctgggcttctcccctgagccccagcccaccactgagggagactgatgtctctgcaggactgagaggcaggccctgaggaaacccgggctcacccaccatgagctcatagcccctcaaagcatcaccaggcagaaagtttctactagaacactgaagagggacaaataaccaccatgacaacggtaatcacaaagaaaacaacagtgtaacaccttttgtcgccctcaaaagcacaaacatcactgaaacaagttttctttctacttaagctgctttgaaaaaaaaaggctgctactaggggcaggaaggcaggcttcattagctgaatgacatatatggactcttaagatgcagcccccctgagaaagtagcaatcggcccttccttcctaattctttccaacacacacgcagttgatagaagtgatggagagtttcttgccaaatcatcctaaactaggacgtaaccgctacagcctggctcaaaaaccagagcttagagctgcagatgacctgacgtattagggagctcacaccctgaaacattttctcgggttacatctgatctatacagaaacagatgaaatatacatgtaggttcttaagtataataaccaaacaaatgcctgtgaacaaggacccaacttgagaatgacaacatgaccacggggcttctccaccgctcaggcaggcggtgggtaaatatgaccctggacatgaatgcgtgacccccaagcaatactaggctcgtgtttgcttctgtgctttgtagaaaagacggatcctggacgtagtcctttttgacttgctttatctacccatataatatcactaagatccatccctgctgttgcccgtggctgccgttccttcatttttactgctctaaaatattccattgtgtgaatgttatttatttaaccttaaagaaaatgtctttctgagacgtgacacctggagtgacaggtgtgttctgtgctctgggcccacctgcgagggatgataactgcagttgtcctcgggttgggggccacatgttttatgatgtgtccttctcgggagaagggacatgttcaggatgatctgagtaactgacctctccctggacctaagcctttgaaggttgttgtagttaagacacggtcaggtgcgggtccaagagacagcactaatggccactgcgcctgagtctgcagtgcacccaggctgcagggaggaagtaaccaggaggctgaagtctccttggctcttggtcccttccactaagacatcctggcttcagctgtaggtctgggtgttcctgggagaatatctgtatctctggttgcaggatgtcactgagtcctgcgcagtgttcaattctgagatgactgaaggagaaggaggcagaattcccttccctacgggtcctgctgagatgttagcaggtgtcaggacaggtcatccggcccagagcctcaagatccatcgtccacagaagatctgcttcacatttttaaaatcatagcttggcaactgtcaatacattgtctcccactttgcaatacataaagaatgtaaaactgtgtcctgttgaaggatggcagtgataccatgcaagcaaaatacagtgctttataattttttttccagcatccctttccaccaaggcctggccagctccttaatgtctaagttcatcctctgaacctgatgaatcaatcattccaaggtggaggtgggtaatgacagtgctgagaaggccatggctctcacttaaggctgacatgggagacaggcagggctggacgctgctcactggcccgccaatcggagctctaccttccaacttcacagtgcccctaggacatgcccggtggcgtcatcacatggctcaccactgaagcactccagagaccgttccccgttgtttttaactgcccacctagcaagtgcatttctggttactcttatgaaatctaaacatggagcctacagctctgcctgaaacctcatggaaacacaccaaggtgtctgcatacggcagactcacgccaggttaacgcaaggggcctggccacaatcaggcagcaaggtcaaaagcacctgacactaatgatgtatcctcgtttccccacaacagcaggcccgacgtggacagcagtactttccatccagactgtgtgtgagacagagggagtgagccagagttgaggccaggagagaaagaaggtagtgcttaattgtcgttgattacatatttattaaatatatatttttatatatattatgtatgagtaaacgcatttccttgaagatgttttttctttttctttttttttatactttaagttctggggtacatgtgcagaacgtgcatgtttgttacataggtatacacgtaccatggtggttttctgtacccatcaacccatcacctacattaggtattgctcctaatgctatccttctccattccccctacccccaaaaaggccccggtgtgtgatgttcccctccctgtgtccatatgttctcattgttcaactcccacttatgagtgagaacacgcagtgtttggttttctgttcttgtgttagtttgctaagaataatggttttatgtttgtttgtttttttttgtttttctcagacggagtcttgctctgtcacccaggctggagtgcagtggcacaatcttggcctattgcaatctctatctcctgggttcaaacgattttcgtgcctcggcctcccaagtatctgggattacaggttcccggccaacacacctggcaaatttttgtattttaagtagagacagggtttcaccatgttggctgggttggtctcaaactcctgcctttgcctcccaaagtgctgggattacaggcgtgagcccccgtgcctagccttatgtatgtatttttttttagagactaggtctcactctgacatccaggctgcaatgcagtggtgcaatcatagcttactataggcatgaactcctgggctcaagggattctcccatctcagcctcccaagtagctgaaactacagatgcatgctaccatgcccagctaacttttaatgttttgtagagaccaggtctcactatgttgcccaggctggtctcgaactgctagcctcaagcgatcctcctgcctcggcctcccaaagtgctaggattacaggcatgggccaccatccccagccagtacttactttttgaatggatgaatgagtgaaggaataaattagtgatggacataataaaggaatgagtgaatgaatgaatgaatgagtgacagaacgaatgaatgactgaataaatgaaactaattatttagttaccttcttcccagccacaaagctctctgatacaagataacatcaacatcaaggattagcaatatatgtctattgatgaaaatttggaaaataaaggcatatagaagaaagcagaaaaataaaaacccttacattttggagtgcttattccttttattttccctttataatgtgtgcatgtgtgtgaatgtgttgggttggtattgtatttggcaacctgcttttttcacgcaacattgggtcaagagcatttctctcacatgaaaatgttttaaaccagccttctgctatcaaatgctgagataacctcaaaggagtggaagtccatacagccagacaccaaaggccaggcctccctcttccagccaggagctgcccaactcacccaggagcatgctgccaccgtagatccctgagttccacagagtagcctatgatcatgaacttcactgcatggcattcagcactctttactattcaatggtttgggggcctttaaaaatcagaaagcaaatgctatgatccaatggtgagctcccgtaaataggtttaattgtaaaacatcacatttattccagatgtgaagacacatgagttttgccatttaagtagaaagacaaagcataattctatcaatgcatatttttccttttcttttctttatctttgttgtgggttttgttgttcacctctacacagcttcattgtcaaagaactctaccaagtgggagcactggatttacctctgctctcagtgatgcggctggtttacgaatacccagatgatttcacatttgtagacccaggataaactttaagaaatgtccacatctagaccaggaagaagttggcttcaggtgcagatacatcagggtagacccaccacagtctcccacacagtcaccccatccacaatcaccttcccacactgccacacacctcagaaagatgttttctcccaggtggtaaagacagcagctgctgctcttgtacttgaacctggcctccaacacacacacacacacacacacacacacacacacacacacacacacacacacacagtgcattgcaggataggcagcctagggcatccctttgcatgtggggctaccctcattcaaggcatcaccgagggctcagggatcagaagccacgaggggcatcttcacaaccaaaagcaggaggaaaaaacgtctccgcagcacccaatttgatgctggctctccgcccctacatcaacttgcacagccaagccctcaaggctgtgcacactgggccagcctaccatcagtagagcaggaaaccaagctactagagaggcaaccaaggttgttttgaaagcgttattattatcattatgattttaatgtagtagacttgtgagttttccatcattataaatccagtctgaattttcatttttaacgtttacaatttgactattcagaatgaaatcttaagcagcaaagtttggaacaagatgaatactgccagttgacttacacctcccgcatataaacaattgtgtcaagttaggaaaactaatataatttatgtaaatatcctgatttctttgatatcaacataacacgatgaaggcttcaaattcagacacaagtttccaacactgcagcattgagacagctttccttcaagcaccttccaaacccaaaagaatgggcaaggggcgtgaagcctgaatgggaagtgacttaccactgggttttaggtttggaggcctatggcctctggtatatggaacttccctgaaatctgccccaccagcattctgcaccaactctctgacacaacagtccctctgtctccactaccattgcttctaaaacaagggacaaccccacttagaaaggcaaagtatccttgcattatgtaggccaagtccagaggggaaaaccctttaaaattagagaatctctgggtatagtgattccatggaagcacagtgattttttttttattttttcaattccgtaagtggaaagtgaagaaaccattttcatatgagcatatttttctccaaggaacagttagaaaaatgctgatgtggtgtctcaatacgttttactacaatgccatcaattacataaaaacaaaattaagtcactgtttcaaaatccttaaatattattcagctaaaacccaaaaggacattttcagtattcctcggtcattatctaagaagctccgcgctgtagccagccacctccgctgtgctccgtaggaactaaacataggtagtatacgggcacagtgcctctgtgtcttggccgttgggctctctgagcgacctcaggtaatgaggatgcctatggagagggcttccgcagtccggccacagagccaggctttacaccctcagtgctttcactggtcgggaccggccagggaatgacatgtgaacttaggctggtctcagttttcccgtccatccaatgaggctgtccctgcagatgaatttaaaaggctgtgatcctatgaatttacctatttgctgtcacccagagactgaaataaaaaaggcaaagatgtctgagatgaatacagggattcatatgctttcatatccgtatccatttttgttgatgcatggaggcttctgggtgcctgctgagcgagagaaggggttgctgactgtgatgctgtcctacctaagcgctgacggccagagacatcacgcgcgcactcccacgcagctgtgggaagcgaaatgtgtgtgatctttttggagaacagtttggatatttatcattttgttaacctgaacataccttttcagctagcaattccgcctgtaggactgcatcccacaaggatgtaagtggaaggacattactatacaaaggcgtgtgcagaaggatgttcactatggtactgtttgtcaaagaaaagactagaagcaaccagaatgtccatgcagagggtaactcattcactagagtcaaacgtggcccttaaaaagtataaggcagctctgtgcaacaaaatatggtaggatatagcagctgaaacctaacatgatataagatgatgactgagatacatagatttgccaccattttattatgtacaatgtaatatacacagcaaagtttaaagaattttgcctgtacacccatcacctagtttaaaactttaacattccgctttatttgctttatcacatatatacccatcattccatgtatcttaacttttggatgcatgtcaaagtaaactgcagatatccaaagtatattcttagacaaaaacaggtacaacatggagtgtaaagtgtggatttctcatttaaaatatttaaaatatacttttaatttaatggcaaaactgcaattacttttgcaccaacataaatatctagaagactatactacaaactggtatcggtgcttgcccctagggagaagaactgaggagctggggttagaagaagactctcttttaactgcataccctttgattctcttgaatattgcattatggacatcattttgtttaatttaaagaatgacaatgcatccactttcatgagagaaagctactgtcaaatctttcagggctctaggtagcttctgtagagcagccctgcatgcttagaagcctggcgcgtgtgtgtgcatgtgcacacgtgcctgcgtgtgtctgtgtgtgcatgagcacgcgtacacacccacacccagatgctcggagcctgcacagtgagggtggtgctgacctcccctcatctatcgctgtaagtcactttctcatggggctgaaacctcggagtgtgaagcaaccatcttcaggaggctcattatttaatttccaagtaagcagctgcaaaagacagcatgtttgttgctgttagggagaacggagcacatggaagacaggagggaaaggcagttcctctgctcagggtagctctgcactgcgagtgcccatgtctcagtctcccttactgtaaacatttgtgcaacttcaaataaatatcctccccaagtctcacgcagccttcggctctgatggaaaccctatgtgtgccccagtgtgccagtgtgcacaggccagagaagcatgcaaatacaggggagaagtccagctccatgtgaggaacgccagagaaggcatcctggagagaagtgagcagtccagaatgtagactctccttccttacagcactcagccaggctactgaaaggcagcagctttctgtttcattaaaaaaaaaaccagcagaggagtaaaaagcccttagaaaaaacatagaattaaacatgatcatgagaacagtactgtaagccaaaccttcaaaggaaaaaagaatattccacggcattactggatgtgttcgaccaattcccttcttccctgagacctgtagctcgaggttctagactttgagcctctgggctaccgctgcacatttttgaacagcgatcaatttccttgtgtgttttaaaccctgggaatcatattctacatgtgagagatagtaaaatagattttaaaaattgaggtaactgaatatgtggagttatgtcaacatgtcagaataaatacctgaaatccttacttttctacatatgaaagggatctgatatctaatgagagggaaggaaaatgcactttgttagcattctgctttattcttgaaaacatgcatataaggctagttttaaaaatccctctgataagaataagactgtgagaacactgatttccactaggtgatacacatatgtaccatacatatacatacatatgtaagaatacatatatgtacacacaatacacgtatacacgcatataaatatacagtgtatatgtaactgagccaggcagtatacttaaaggcaataatatgatagtatgaaggcaatttgtatcttaccacatattgaaataaaacaccctgcacagcccctaaacctcaaaatccaatacacaaaatgaaacgaattgcactgggaaaaaaaataaagaaatgagaaaatgaactacgatattctcttatttgtttagtgttctctttctctagagtttacatggacattgtctctagttgcatctgcaaaccaatacatcggctgtcagatcactaaggcatttgacaacatcattctagagcctttagttactgagatatcaataattaaatgcattcagttcacactttgttcttgcagataccagctatttatctctgtcctctgaagaagctaatggtataatgggcaaaacatcaagaataattaagaaaaacgttgctacaaactctgtcagaagaaatataacttttgcccaggcccccagctagaattcatttatacaagatccacccaaaaccaaggcacctttgctgaaaagcgaagtgctaggctcatggagcagggaactcactcactctgtccacctgaggggaagaccagtgggcacttctctgagtgtgagccttgaaaagccttgggtgtgtgcatatagcatcagctataaaacagcggggactgcgggccacgttggcacctctcccacaccagggatgggctctggaaggccagcccaggctgacaaatggcagcaggactgacttgcttcagtggactggcccctgctgatggagcccaaccttcctgcaggccattcacctcccagctgagccatccatgtttcaaagcttgtttgcagcattagctggtaccaaaacagaagttctgagaacatcttattcaaggaatggcgggttaaatcttaacaggtctatttttctttagtagagagtgtctctctcctttcatatccaataacaaataagaagagagaaactgtgaggtgttttcttctttaggtaagggtcaggcctagatggtatataaactccaaacagattatattttaagttggtgacaattaattacaataccgtatacatactgcagataacacaatttaagattaaagaattatctggagccatagtaatgggagatgactttgaagaggcagccttccagataagccatgtcacatatctgcatatcctttcaaacatctttgtcacctaagcgggagtggctcccaatcactgttcaccaatctcacttgcggaagagttggtagtcaacttcctgtacaggggccgtgtgagctcctggatgtctaccttaaacttcaaagagccacatttacagaaaatgaaatgctcacatttcatcattaaattacactaggctcccaatcttcatgcggcacatgtattgcactgaaaacggatatttgttattaatgacaaagatatggaaaatgtgaagttgaaataagctacccaaacttaagagaaagaaatgttacaggaactgctttgtcaaccctaattgtgtaattacttcttggcttggtcacccaagctccgagcaagaaataagagacaatggtaatttcttactactgaaatgaaggtgtcacgctgccttgtgcattctgtgtaagcagggctaaagtttacatttatatcacgttacctccattacaatcatccaggccactgcaagaacttagtggtataaggtcagccctggcaatgggcacgctcaagtttacttgcacaaacatttaatttaggcagagtggaggcatctctgcttttggtcatcatcttacccctcacctcacaccggtgaaattggtgaactgctactggcaacttgcagactcacagcaataaaatagtgtttttaaatggtgctaatacagtggctaccaataaaaatgaaccactagatggctttagatttttcacttctgaatatcggaagatgcattatttatggtgtcaaagctaaacctgggtacagcacttgggagtgggggtgtttgtggagagagaggcaggaacaccgccctgtgtaactccatccctttctctcttcactccacagttccccttatagctcgataattaattacaaggccgcataattctatcttcagtcccatcagcgttgggtcaactaagagcaaggatcacatgccaaaattgttgtgtgttttttttccacaccaagtatgaaccactcctcattctaatggaaaaaagagcgcagacacacaactaggaagagaaaaaaatgaaattccattataactggtttcctcaagctccagcctaggatatgagtaatcataaaaactgtaatatcagcttttttgttttccttaacactgggttcctactttatttcctttcaaagagggtcaagatcctttttttttttttaattcataaaagctgctgtgtgataaccaaaaggttggtttctctctgtaatagctctgccttccgtgatacttttaaatttgggggcaaaaataaaactcgctaaactctcaacagctgccctgagtgaacttgaagcccctcacctgcctggccctcaggccttctggaaacatctaacgcctagcaggggtggagcagtgagctgaccggcaggcatggaccaggagctgctagcacaggcctcgggaggtggcctccgggctgcttggccgtaccttgaggactggcctgacggctcccaatgcccgagctcccatgtgaagtgcagggaggagcaggtcagtggccacagcagcctggcctggcctgggtcacaccctcggtcagcatcgccccaatgtcactctctagttctgttttctcctccctacccactcccaccttaaccagccacagggaatggcggggtgcaaaatggaggctgttgacctgctgtgtgatccacacctccctctgggctcaaaacatcaatgtgcttttaacaaggagccaagtgctgtttaatccttgggcggggggaggaaagtccagaacacctatgggtcatgaagcagcccacgctgagaaggcgaccccagaccccagacggaggtgtcaggagcttgttttcccagcacttcctgttggcagggtcacagctctaccgagagaaggtgggccgtaccccagggcacaggaatcagcattgacatgcccaaaaactgacatgcatgcttgtcccccacaggcacgggcatgtccccagtcaccatggtggcagaaggacaatgggaaacgcagggcctgccaggcaaattctagcaaagacgggcttcctaaaatctcccttctacatgagagctgcccaacccaacggcagagttatgactcaccgaaagggataccccctccttccctctaaggactgaaggagggaaacggcgcatgtaaccctggcctaagagagacccccgggctgaaccaaagcatcagagattcagagggcacgcggggaatgtggacagagcgacaccaggccttcctgagctcacctgtaccagagcctcaggaaacatgtctgtaaaaccgctctcatagtaagcactttattatctacttttggcgcagtgatgagttaaaggggcattaattttctttcatagcctggaatagcttatttatcattttttttgtctttgtcactgatatttcagatctgctgcgaattgctgtttttttgttttgttctgttttgttactgttgtttaattaatctgcactcatacaaccaccaaaacaatcacggtcctactggtaccagcagatgtggccgaaatgtgccctgaaacttcccaactgcagctcgaccctgcttgcagtgctgtgtcataacgaagggaagtcaactcaagatgcattttctggaaatgccatggacgcacagagagaagaaactacaaatagtgttgcaaggaaggaggccagcggctgcattcactgtgtcactgcggccaaggtttctgggtaccttatgttcaccacctgccacctactgtggtgtcagagctgtctggtccagccgggacagtcaattgattttcacagaacgtccattttatgtttccacaccagagcacgctgcaccttcgtaaggaggggtggctgcttctaagggcagagcggctgggccccagccaagcctgcctccctgactgcagaagatgtcacctcccccgggcactttcttctgggcaggggcaaggaggaggaagggagaggaggtacgtgaagaagatgtcccccataaaaccaagggtgttcccttctcaacctctcccttttccccctctaactgagtctccaaaaaatgcatgtttccattcacaaaaagtatgcagaatcactgatgggagcaaaagaagaccctttttcctattacaggcaaaacctaggctgattctcttgcttccttcagctgtcaatgaggtggtgtgttcccggcctcctgacaatataatcatcataaactttattattacatctggaatttcatgatatgtttagtaattgattacagagacacaacccagaatgcggctcccactcgctctgccacgattccagtaacctaactgcttaatacccctggaatgtataaacagtgttaactgctgcattccccacactgccatggcagaagggaaccacggagctggtggggctctgaaagctcaaggccattttcacttactgaatataatgtcatgggatagaaactgagatcacattttttggagccacgatgaccgacgacccctcatcagatgtgattggggcacaaatccactaaaattatcagctgtattggggaacggagatgtgccatgaagtttgcacagggccatcacccatccctacttagtctcagtttggtggggactccagtttaggggactgtgattactggggttcttcaaaaaagctgcacaactcgctatttctaattttatgaacaccgtgatatgaatgcaatgcaaagcagagaaaaagccatattgggtcaggcctgcaattacagtggctagtgcacttactatctcataggaataaaggcaaaaaacaaaaacaaaacaaaacaaaacaggggtaggccaggcacatggctcacacctgtaatcccagcacttttggagaccgaggagggtagactgcttgagcccaggagttcgagaccagcctaggcaacatggcaaaaccccatcctacaaaaaatagaaaaattactcaggcatgatggtgtgtgcctgtggtcccagctactcaggaggctgaggtgggaggactgtctgagcccaaggaggtcgaggctgcagtgagccatgatcatgccactgcactccagcctgggtgacaagggagatcctgtctcacaataaataaataaataaataaataaataaataaataaataaataaatccaggggtgaaggccacactcaaagtgtctgggagttggggcctcagagagatctacatgaacagggcatttgttccctcccactcccaccaagggagggcgaagagcaatgcagctgccctccctaacactactccaactcaggaggttatgaccaaggacatgcgagcccctctctgggtgaaaatcagctccattccccctgcagaaacgctcccactcagctcttgtgcctacactctccctcctgtaacaagtcaatttacaaaaaccagacccatctcagcaaggggacctggatcggcccttttcacccgcatatcatcttgaacccaaacagtcccttgaaccagcaaatcctcagccaaccccgtggcatgcagagtgtgttatctctccaggcagatccactttataaaccaccaaagaagccccatggaaggttctgcttgcaacaaaaaaaacaaacatgctgatgtcactccaacctgagctcttgggccccagtgatggggcccgggggactttacagtgggatgcttgtcccagagctgcctctccaggccaagtgagccatcatcctgggaccacctggaccagccaggcccccatgaaacttggccagcgcgttcccgttaaaaatggtcctgccattcacctcagccaggttcccgcacgcacgctaataagtacttgtttgttgaactgaaaaatcattaccacagaacacgtcaagtaatgaaagatgttttccttgcagaaatgttaaatactccacttctttcacaaggagcgtgtacgtgtgtttccaaataataccttgctccctccccacccacactacatcagaaagtatggagctccaagacccaatttgaacagggctcatgttgcacggctctaagaaccaagaacatgctgttattttatttattttcctttgcccagctgactacgtgtttgttctattagttattcacctaaccatctcggtaggaacctccgtcactgtcacgtaggggagggtccactctgccttatgattttatacagaaaagcaagagaaaataacaccaccgcagcctcatctattacacacccatagtatttgctaactaatatatgtgaaagagccattttactacaacctcagagcagaaacaaaggcaagaaatggaatgggaacatttcaccacatgaaaaccactgataacccatcttctcctctggcaaatatgaatctctgccccctttcaaaagctttttgttaggcagatgagtaataacaattgcgtcttatgcaatgcactgaggtcttttaagtgttttggaatgtctctacctacagggagtcacactggttaatttctgctgcctttccctctcatcctaaggcttcaggcaaagccagcagggtgggggctgagcctgctttgagtctatggcagctgagttaggaaaaaccaaaatgacttccaggtaaccttgtctcatggaactccaggaggcaaatacacatcacttagatagaacactcaaatatcaagttgatgcgggggtcagtggagtcttaggttttctcaccataacatatggctttgaatgtggtggctctatcctgccatgcccccttgagacataagagacctatgtttatgcctggctcccatgtcagagaatccataacctggggacggagatgctgaaatcctggccaaaatgcacacccacagaagccaaatctcctctaaagaataagcaatcatcatcccttcttcctgccctctctctgtcatgtgttcagtgagtcactcaaaaagctgccaggggttacctgggggagcaagaaacacaagatcctgaccagggctccaggaaaaatgacctgcgtgaacttctcaaaacttaaagactttccctcttcttcacccattgcttgttttcccatttttaagagggagcaaatctcactctaattttactagcattaaaggttgacattttttatatgtgaattcacaaatctaccataaatgattcacgggatctttcttcctttgcccttccccgacgaaccgccacattttggaactgcgttggctgacattaagcaaagcgctttctcagcaattatttggaaaggagagatggcaactacaagaatttctctctgaggaacagaggagctaccctcacggcccacttccaaatggccaggtctcacggaagacaggagggcctcctcccctgcccggacactgccatccacctgaagctctcaagccctggtcaggcatctactggaatctctggcattcctgcagcacaccccgttgttggtctagaacaggtactgactgccctggaaaatactgaccttaaggaccactgctgtgtgttcagaaaactcaagagactggttgtctcccactcagacttgtgagcttagaaggccaccaaggagattccggctcaagaacccaaatcgtcacctgaagtcgaagccactcatttccctaaaggccaagttctgataaggaacacttgccccagcctcctgaacaggtgagacctctgtgagggtaccagcaggcctggcaggtgcttttgcttatctgggtctctctctacatatatttctctatccccaaaaggccagagctgtgtcacccccgtgggctccaagtgcattcattacagaaggtggacgtcacaccatgaggtgcagccacctgagattcctctgggactcttggcaaaaaatccccggtgctgtgacagggagggagtcagggacggagtccctagtgcactgatctggcgttccctgaaaacggtgtcccagctcaaaaatgtgttgctttcttccttttcatgaattctaatattcaagccttttttcctcctgctaattttagaagtcctgctattctttgggaagagaatggtgtgaaaatcaagcatagtatccaaaaataaaagagtagatctgtttcagggtttgcagcatatttcactgaaaagcaactccagatatgccactttctatctagtttttaatacattttccaattcctccagaatattttagcttcagaaaaagcaagaacgaacttcctgaactatgacaattttttttgaggctgaaaggggcacccagaatggtctttaaaccatgactgggggccttttcagaatgtgacgccaggttatcgctctctggctgggactctgtagtgcactttgtgggaccacacggagacagattcgaagtaggatggatggattctctaggtccttgagcatgttccagttaggcaagaggccagaggagatgcatagcttactctgagcatcttgacggtggacctcatggaatgtctttcaagcttcccatcttcatgttttaaaaaatccggttatctaaggaacgaagtttcagacccaccagaactgtagaagggcatcggatcctggtcagcagggtctcactccagttcttcggggtctgagactctctggaagagccaagaatgtgggctggggagtggagggaacagatgcggggcaccagtggatacctgaagaccccagcctgtgcctcctcaccagccaggaaagccagagatttttaacaaaaagttagaactttgtgtcaagcccttcaagcaaacaataaatattacttctgttcataatcagacttctctccagcatcgtctttgaatgttgaacctttttcaattaattaaaaactatgcactgcagagtgcatattttatcagccctcagctgcttaagtgtctagaaaagaccaggcagtttttctttctttcttcctttctttttctttttttctattttttttttttttttttacaggcaacccagagcaagtacttgcaagggtcatatctttttaattatcttttctctctttgattaattattccgtctgacaatagcgtgtttctaatgctattcacctgcctttgatgattgacaacttttctgtctgattcagagcaaacagctgctgccacaatctcctagcaacccgggtgtgatggatgagcccccaagatggatggctgcaataaatcatgtctccagccataaaactgagaaaaggggataagaagaaaagcgaacaaaaaacaaaacaaggtttcttcccatgagtgcactcagttccttaccaattatacctgaaatggactttgcacctattaatagcaaagtttttctaatcagtaaaaatgggatgatggcatttgtatcaaaggtgtttacaattgttcctgcaaattggcacttgtactccaatcaccttcaacactgcccaagtgcaagggcagatgatcaaagttttgccttcttccacgaagtctcagcaaggaacaacatcacctttgtaccactggctacaattccaggcaccaacaaagaataccaatctgattctacccaatttttggcagcagctggacaacaccaaaagtaaattctaagtcatgctgaatgcagtgcaaagtgttaggctgcgaataaagttatttcaaaataaacacacacacacacacacacacacacacacacaaagttgcctggagttgatgagtgaatcagtaccatttccatttctttcctgttcatggcagttgcaggcgttttacatgtcagggaaaagtttgtcccagaagcagcaagataggaacattcagccctttcacaaattctagattctcatttctttaggtagaaaaactcttccgttctaactttctatcccatcattcttaaaaattaatgtccacactgtaagtcatacaacaagcctttgatttcattagcaaccccaaataaagtcacatatttaatagaatccctgccaattaaatttgcactatcggggctctcccagtagtgtagatccagcaggaaggcctagagtttctgctttcctttttccaccagggaagcaggctgcaaggcctcttgcagcagaagaggtggaaaggccagagcttcaccgactcctcaggcagctgggggctgtgtcagtgaaccaggctgcgtccctgagtacttccagtaggtgggggtgtcctggtgcacacagctcaagggtgcaaacccagaagcgattaactggcagggcttgggaacagctgtccacatcaggcctggtgggggtctgctggggccctgcagaggggacagagctcagacacaaaggggaagaggctgctgggagcccgggcagggagccgcaaaagattattttttatctgaaatattcctgagacgtggaagtctttacgtttcttcattctcacactactaaccaagccaaccaaaagatttttttaatagttatattgtgctaagcttttcagatacggtgttggtttttcttttttttttcttttttttttttttttagcatgacacggagtttaaaaaaaatcagacaagggttctggcttcagcaactgcagctctgtttatattttaatgttttgtacgtgactgcttctgtgggggaagaaaaagagggagagagaaagttgcctgtgagctttagtgtaaatcacagatacttcatttttctctgtgtccttggaaattattcaaaattaaagccttcctccctccatcttttttttctttctttctttctttcttttttcttttttttccagtgggggagtcttctgtattgcacatgcgagggtttgtgtctggtcagctgcaatgagaaggcaaggccaatcgatagaaacacacacacaggcccctaccctgccccagcttgtccgactctcaagttacaggtttacacggcaagtctaaataatattcaaaatgataaatggtacccgaagcccggcatccaccatcaatctttttttaaggaacatccatcttcaataacgcacgtttgaatcatgtgaagtcaggagccctgagattcatttctaccaccctttgcaagccagggtggcttgaatgatacctgtcaacctttttcttttttcttttttttttctctccccttgactaatggggaaaaaaaaaggcagggaaaagagaaaaggaatgagaaaggggggaaaaaaagtcagaagagtgtcaaaggctgaacagtgtggtttagcagataatatgaatgagcataacctctcccgtgcctctgccaatctcccacccgccacgccacgcacccagccatccagaagcaggctctacccccttctcccctgcccagcctctttcctccctttccctcttgccaaatcagcagagctccctcctgcaagccacagggtacagtaccaagaggaggaagagacagcctcacatggacctgggcttccctcccctccccgtagtctggctggggcccatatgataaatgacatatgtcattctgtcaggagggaagggtgggtcagtgatgtatgactctgctgaaaaggaaatcgactgtttggcatggtgcagctcttctccaccaggatttagtttcagaactctgaaatgaattctccgacgtttcaagtgcatacttagggcagggtgatgggaggcctgggaaatcgtactccatcctcccactgcccttcccatggcaaaaaggaaaaaaaaaaggggggggcgttctgctgctgatacctgcaaaaggccacgcacgtgtcgaagtccctagctgtcgcaacaccgtgggttatttaaaaaaattgactttaaaaaaaaaaaaagaaagaaaagaaatcaagtggagtcaggttagcccttttatttatttattttttaatggcaaagggctgacacaaaagcaagataaaaattagcatgtttgaagtaatcgtcccgcagcttgacatctgcatagtaaattttaaaggaaaaaaatgtgtcagacagccatgagccgcctcgccctccccctttcattagctcactgccagggtggcactgctgaacctcattatggcgagaggatttatgaagctgaacccaatggcaaagaaaaggcatctgtcaataattgtagggagctgcactcacagctttgaaatctcattaagtatgcagttatcaggcataaagatcaaaaacattactcaactccgacagaatcttatggaggaacattaattagcaacaggcctacagtacaaaaaaaaaaaaaaaaaaaaaaaaaaccacagacttcctctcacacctgcccaacccacaaacctaaagcaacactccccctcccgcctgaaaaaaaataattcccagcatctgaaactgatcaagaacatgaaacaagagagacgcacacagaaaaggggaaagggagggaaggggtgggcggcgggcagggaggaggggagagggagggcggggaaattcagttgagaaagccttggcggtgaggagagaaaaggaagaagctgtcaaacttgagaaggatgtcagtgcgggccctgattactggggcctatggagttctcagaccttttatcatcatcaccatcaaaaccagtctaggagtcactaccgggaggactgggggctgcaggtttgcagcccaggcccagggcccagaccccaggaccctctcctccagcccctgcttacctggcaggcaggaggctgcagggccaagacccaggaggcaggccccgctttccccagccagtctgcacccagccagctaaagctggcagcaagacctgccttcacaggctctggacacaggccagggaaccactgcgttcaccttccatctctcaaccactgtaacacacctttttcttcctccaaagagactgcagcatccccttctcacacaggcaccttctgttatttgatttctgtgtgcaatcccttactgaaaaatacaatatagatgggggaaggcacgtggaaactgccaagctgaccctgagtcccgaggcctccagacctctgtaacacttgggacaaggtgcagctcattacgggtgtccagcagatccacacactagtttgactctaggatctccaggaaggtaaaattaaatggcaagtttcctaccccaccacattctagcctcttgcaagatgcattggcaaagagtaatgtacataatgtacatgtgtttcagaagcatcccacaagtattgcgcacttggggtctcaggcaaacttccctgatgtcctgtggtggtctggatccagggtaggtgcacagaggcctgatggggtgggagtgtgtctcaaataccacacaggtttcagtccaacaggcaacatcagccactcccggacatgtcatgcaacagtgaggcaccatctgtagcccccacccccatgaaaggtgtaggaaaataataaagtagatatcctgcatgttatttcccttattgcactgttatagaaaggtggccttctctgttcacctgctagcatgcactcactctctctctctctctctctgacacacacacacacacacacacacacacacacacacacacagcacttcccacagtcccacaccataagaaaacctacagaacagctcctttgatccgaatcctctgctagcattctcctggctcctcactcactcctaggccacattcttccctggttccacggctacttctgaagtgtttacctctctggtctactcagaagacaatggtcaccttttcataattagccacatctttaagaaaacgggcattaagattcctaggcaaccagcttggagatccctccaaaccaaggcccatcttttccaataaatgcctctcctttagaatatcaatgaacacagctcgaataaactgtcacctatgaccaaaaataggaacacttgtctataaaccagacttgatgagaaggcattttagcaggagtattacaataaggtgtttacattttttatgtacttaccatattacctttattatgtgtaacatcaaagtgattatagcaattacatctaacagaattaattacagaacttcgtatcattccaggatacataatgcattagaggtaagccaaagaaagaaaacatcttgattgtggtaactattgttggggtgtattttctctagcagcaatgccacaccaacggcagctttctgagcaatggaaactgaggggtttaacagggaaaaagctgtattctcttaaaattgaactcatgctttttgcttaatagtacgttggtgatagtggacatataaaatcaatttaattttttaagtgtaaatctttaaaaggtgctggttaatccacccaaccaatgttaatacataaaggagaaagcacatgggtgaaagacttacaagtctttacgtatgcaaaataaattcactcaaggcttcattaatattaatttaaattcaaaacccatttacattaaattgttcattaaaaattgcctattttatgcaacatgcatttctcaaagaactcagaggaaactgaatacataggactagatttaatgatgggaatggaaaatcaaaagtaaatgaattggagtcatttcacgtatattaccaaacagccctttgctctccattaaggatgggttccactttgggaaacaaatatattttctgaatattgtgttttccattgctataaacttgtaaacatgaccttctggcctaccacagaggaaaaagaagaaacacagagaaactggtggaagggagagggcagccaatccaaaacctggctaacattaaaacagggatggtttgccttcggatctcacctggattcacagtgcattgagagttaggcttgcgtttttaaaaatgtacgtaagttagcatctgccagtgcccatcttgatctagaactaacagtgtctctctcccctacactctaccctttacaatcctttattctcttagcgaggtgaccaggaatgcgatgacaaggagttggtaagttccttgtgccctccctcccgacaacaatctgaacttaccctgtttccccaacagctgttctggatgaagaaaacacagtcataattaataacatgtgtcctgacagtatgaattaataatttatcattaagcccaaacaaatttaaattattcttcaagagccacacctttgcatatctgagaaaataaggtaaggagatggttaaaatgtccaggtaacgtgaccttcagtgaactactcgcccccaccccccggactgtatctcttggactattcttgttgaaatgctaaaataatttacagaattgaaagtaattaaacccaagaatctaaatgctgatcaaactaagtgcatgtgctagaaatgtcttcttttttaaatggggcttataaaatattcaatatttggtcaaggacactctgtaatctttctaataaagattcctaaacctagagtatgacagttgttcaggcaagtggtcataagaagattatgttctattactgtctttttttttttacttccaaaaatgcatagcgttattctggtcacaaacagtgacctgaatttttaagtccatttctaagcgtaaatttctacaaatggtgaaaaattaagaaaagctaccaagtctatgtctccagtccttacaattcaggttttttttttgttttttttttaaagaaaatccagaaacaggggaaaaatattgatagccattgtttagtgggatttaaaaatttagtgactaattgcaaatactggaaactggaattaatctgtctggatttttttaaaaaggcttacagacatttaaatgcatgtatcgggacactttatcaacctaacataaaattgtcatcttatcttattatatgactattttatgcatgtgtcaaagaatttaaaaatgactgcctgtctattgagtctaattacaactgcacattatctgtctggatgtaccagtccatatcattgttactaaatacaatatattgtattcacctttcatttgtaacttcagacagagaaaccacaatttagagcataactaaaacacagacacagacacacacacgcacacacagagtgaacacctgcaagggtttgggatactggataccactgttcccttctgtccttttcccctccatgggctttgagggtgatgctacaggggtgtgataaagcagctgatttgaaagatccaactacctacctgggctggacactaacacagaagggtagacacacacaccctactttatttcatttttattaattgttttacgacatgaccaaagctatttttaccctctgcccagtgacaggcagggatgaaaatggggcaggaggaaagccttacaaactgcacttgggataactgtgaactgctgccactcttggattaaacatggctgtgtgcaccaggaccgggcacttcctaatcctttcctctctgcctccccgcgggcctgcctgcctgcctgccgcagccctggccccagcctgactctggcaggacacgtgtaaaagagaaagcaccacaagaggtccaggcactctgccttcaagaaggtaggtcctttctctttccagaaatcccaggagtggagggcggcggtaaaggaatggttttaattctctcaactcacctgggtttcacggtatttcccacagccctgagcagtcgcctttcattctaatcacttgacaaaacaatctttagcaaaaagaggggaaaaggcagacgtgtgaggcaatttagggaatcgctgctgaggcatcagttattgactatctggctcctgtttatgagcgcgctcaaggcaaaactgagaacaaaatgacaacatcaacagctcacaatcaagtgtggccctggagagcactgaagccctaactgacagctgtcaagataatgggggcaccgcagctgattctggaaggttctcttccccacgtggacatccaagggaatagccttgcctcccacctcctttgtttttctccttcgtcttcttggctttcctttttagaatttgcattgttgctctcatttcgtaggaaatgggggaagaaaaaaatcatagaacggtcaaaaccagtcgctctgccaccttgctacagagtagaatacctgtccaaggagaaatacgtggcaggtatgagacgaaaaaaattcccaaagctaaggccgaaatgcccttctgaatgctccatgtgcttccaagagagaacggaaaagctccttcctggagctgcccgatgtgtggaccagacttaggaaggtgtcatctggacaccaccaggtgggccacctcttaggcatgcccatgtctactggcaacatggaaccccctctggctgttccagggggatccacagtgttctgtggcaccagcagaccctagggggtccaagtcactttcacaaaagtcaagatgcttgaagatttacccttgccttgtttttaccacctaagaactccacggaacattaccccctttcaaagaatatagcttgctggcaaattgtggttcgatggtttctttttgttttttgtttggtttttttttcttttggaagcataagaaatggtcttttatgatttcacatttgcctccagaaaattaatataagtaaaatatctgctattaagtattacactaaaatttttctggcattttcagaaatgttttttaaaaaccactctgaacaggagaaaatcatgctttaagcaggggataatggtcattttgcctgaaggacactgtccttccctaaccccactcctctgagcttctaaaagcagcaacatctgtccagcacaaatgcacaccccctggaaattacaggtctcaaggaagcaaactcccgcccaggtttctctttggcaggtaaagaaacctctctttctctttgagaaaagaccctaagccatacatagtttctatcaaaacatcaaaaaatcctaaagtacagaaatatgtattttcagggattcttggagcctgcttcggccttcgggaaagcaatgatacattggcctagatatgaagaccgtgtgtacctgtgtgccacgtctgctcgccctacccagctcttggccttttgtggttgttattctaccctagaccattaaaagggccctaattcctatgacatgattatccaggtaccaaagcccatttgtcacctgcagcagaaaattgagttaatgcacaactaaaggcagccaggactgtgtaatatcaacttgattacatcaaactagctgcaaacctaattctgctggatgacactgcgtcgagcttgtcatctccaatcattaaagctgtcaggaatccatcaggtttacagctaattaggtgaacactaatgaagctggcaaaacaacttttctttttttatggctgagcggacctttcagtttggaggggaaaaaaattctcgagtattctcaaggttgctggggactggatttccagttaccaatcagcagacatctttcttttccccactctctctctctatcagtacaaagcaatcaatttgtcatcactcccagtatgccacaaaagctggcatgaaccttataacttgcagctgggaaaactaaaaaagaggagaaaaaaatgggaagtttctggtccatccaaacaaacaaaccacccccaaaaaaaaaacctctgtgcatacttatcaccagcctaaatgtggagttttttttttttctctccactcttcttaaataagtagctcttcagtccgcctccaccccctcctccacatgtccattaggcagaggcattctgataaagtaaatccaaaacccgagtatgggaaagaaataaagcactcatgctgccagcttctgattgaccattaagctattgatgaatgtgcctgtcaggagagagacaattaaatcaaatatgaaacaaagtcgttttgacgggtcattttgatagagcaaaaccattcttccatctcctattagtcctgcagtcaagttttttatataatgaatttttcttaactgacctgagatttcctggctggctttctttaaaaaaaaaaaaaaagtgtgaaaaggttagtgaacaggttgctctaaaaataaataaataaataaataaataaagccaacagcaggttccctcctcctctgatatttttctggaggaagctatcaaatacgagtctcagattggcagggtgcaaccgaagagatgaactagagagagagttctgaaccaaatgtaaagatgtaatcacatatggttcattggatggaggcacacacataccttaaaatgtgtatccaaaaaggaaagaaaaaaaaaatttcaaagactggaagaagcccaagacattcctactactcaactttgtgaaggattcctccaaagtttcagagtttattttgggtagataagctcattgcttgagcctggaatttaaagtagaaggtgggacgggcaagaagcaagctccaggaggttaactagggaggcggcaagctccctacaatcactcctggaattttcaaactttctaaatttgggcaacaccgaggacagagagcaaaacctgcatcctaagccccaaaccaaccctgttttcttctgagattttctgaagacactggcaggcaagtacatttctgggagaagagagaattatcattccttctctgtgaccccgtgtaaggggtctggagtgcagagtgcagccaacgtgtgaggtcccctggcagtgccggctggcatgatggaaattatgggcactcagggcaccatggctacaacgccttcctccaagatgggcaccagccaatgccctgaccctactctctgcccttccctcttaacatcaaaagagaagtaaaagaaaggaagagaaaagaaaagaaaggaagccccacttaaccctccccttcagggagcatctgaacctctgcacatctgagtgttactcatatcaaaatacatcacgtccatatgtggtcctctcggcaatccgccccaaatcccaaagttgcactgacagggccctcctgacgtcacagagcttggcctcactattgcaagtgatttattgatgtttattgggaatgaatagatcaaaggcagcagcatgacgggcgatcaatcagtcatcaaatcaaggatggcaacgggccagaaacccttcttccaggcaacatgcccccaaccgacattattgcaaaataatgttatgtgtgtggtttttgttttgttttcaatgatgcgttttccagaaaagaaaagaaaaaaatcggctcagtcttaacaggagttgacactcccggttaaagaagaagaaaaaaaaaaaaaaaggaggaacaaaaaagtactcagacacgtcccagaactaagtgctatgcggagatgagggtgggagcagcagtacaaggagggggtgggggcgaggaaacacaaacaggggagaaggaaacgccagcatctaacatggacttgacagtcatctgacaatacccagaccctgtgcgctccgggttccaccgctgtgcccagtttgggcccaagaaatgaggaatcaatcgtgttagtactaaggtggccgaggggaccggctcgctcactcgttcgcgctccctggctcggcggacaccaggcagtcccccggcggtcggccgctcggaggacgcggaagatgtcccggggaactcaggtgaccccgcccgccacccacagaaagagccaggccggggttgcttcccattccctctgcagccggagagctgaggaggtagggacctggcgcggctcagcgcgctccgcgagcggctccccaaatgggtgcgagagggaagagggcagagcgcggcggggcgtccggggggcgcccggtacccgaggcgggcgcacgcacccaaacaggagagcggcgcccggagttactcagtgcgggcagaagagcggggcgaggagcggggtcgcgcccgctggaggcgcggggcgagcggaggaagaggaggaggagagcagaaggaaggggaagcggctcgtacctgctgcgcgccggggcgcctgctgcttcctcctcggcatgatgcttctccggcgactgccactgccgccgccgccgccgctgccgggctgaggacagggagggagggggcggcgggcccgcgggggggcgaggcgggcctgctctcagcctcccccccggagagcggccgcccgcaggatgctgctgcgcccaggctctccgcgtcccccccgcgccgcgctccgccgcgaaccccgaacgtgcggagggaagaaggagggcgggcgagggaggctcggggagggaggagcacgggggggaggaggaggcagaggaggaggaggtggaggaggaggaggaggaccgcgctgccggcggaatgggaagtttgacaaatcgctccagaggccagaggaggagggggcggggaggagcggcggccctgcccccccccgccccgtccccagacgaggtgcgcggggttcggggctggggggcggggagagggcgggcagagcggtgggaggaggagcgcgggagcggcccggaccggtactgccccggcccccgcccctaggccgggggtcacggcatccggggggacgcgcagccgccgccgcggcccggggctcggcggtccagtcttctgcccgtggcgcggctggagcggcggcgtcggcaacaggcaagcttaaaggaaaaggagatgatcgtgtcaatcgcccgcccgcgggggcgccgcgcccccgcccccggccccaggcccgcgtgggacccccgccccgccagcgaaaggggtgccgcccctccgcctccgccccgtgcgcacacgcgggggcgcggcgccagccccgccgagcccgtcccggggcgctcgttaccccccacccctattcccacccagcgttcgtccccagccaccccccagctgccccacccggctcgcactcctctccacccgccgactccggagcccccagcgtggtccccgggccggggctggcgtcccccggggaagccagagcccacgggcaggccccctccagggaggaggcgggcgcgggccggggcgggtgggggcagccctcagaccccgcgccacccagctcctcccccaggacccgccgtagccacttcccccaattttttttccccggacaaactttcctgggcccgtcccgggggtcggtgtgggagggggttccttcaagtttcctctcctgactttgggatgatcagggtccctccaccccgcccctcgcccccgggagccgggccgcgccccccatccacggcgcgggccgatcctagggcgggacgggggcgggagaaggaaaccgggctcccctgcccatcccccgccaggggctccccccgagagcctagggggccgccgcgccgtgtcccgcgcccggcctgccggggctgctggactagagggattgattattgattggtgatcggggtcgctgaggctccgggccggcccggccgactggccgcggcaagaaggagctggctgggcggcgtgggcggcggggcgacgcgggctcacttacgggcggcggtgagggcgcgggtgggccggagctcatgcgggcgacccccgggcggcggcggctgagcgggagccggagcccgagcggcgcgggcggcggcgcatcgatgcgctgcgggctcgattgcgtctccctgggccagctctcaggccgggaatggggcggccgcgccggggccggctccgggcgctgccgggcggcggctgctggagcgcgggggcggcctccgggcccactatccccgaggcggccctgcgcccgggcgcgccggctggggctctggcgctctcgcaggccccgaggccgacagtcccggcgagggcgggcgccccgcgctccagcaccggctgcctgagcgctcctggagcagcaaaccccagacttcttcctccttctctccttccttccttccccctccccttatctttttctttttttagtctctttctccctctttttctgccctgtgtcctttttattttttctctacgactgtttttgcaagtttgtttcaaaagttcacagcatgctttcttttcttttagaccgggagacagtgatctcacccacacggtaagatcaaaagtctccgctcgcccagcctgcgggcttgggctgggtccagacgtctcccaggatgcagatgcgccgccgctggcctccccggctataaagccgcctccagcgcctttccgcgcgcaggagcgctcggagttgtggggtacggaccccaggcggggcagggagtccgaggcgggctgcggcggggctctcgggctggcggactcgggggctgaggcgccgtgcgcgttgggtgcccgcggccgcagaggccagaaccgctactcctccaggccggggagacgcggccgtggagcgtgaaacgcttcttgcaagcgaggaaacggtgagttggccgacaccgccggcggcctcaccattctggtggccgcgctgagctcctgtcgcctggaggcgggttgcgccgcacggggtcagctcccgccggctcccagctcaccttcgaagctcccacttaggcgcgcccggtgcggcgtgtgcacagcgcggggcgccgcacacggaagcgtgtagttctccctggtcgcgcttttctcctcctttccatcccctcgctgttcttgcaaacctctgttccttcggccccctcccactgcgggccgcggcctgaactcgggtctccgcgtagccggccgccgccgctgggtcgctgcctggccctcccccgctcaggcgccgagcgctgtgcgatccgccctaacatctgtccgtccaaccattggcgcatccatcagtgtcaatgggctgcacattgcagcgacagcccgccacgcacaacacgggctatgcggagtgcacgcagcaaccatactgccatgtcgggacacgcaaaaaggcccccggcctggcttggcacagcctgaaggcctaatctgtgttctttcagccacatgtacccacccccacttaatatctggacccccaaacatgaatagttttgcagaccattgtagggatggaattgaaggaagaggggcagtgtcgcccgagtcattattttccaccaggttttctctgcccttgtgtgggctgggtgtggctaggagagaaggaagggagacttcccaaatccgcaccaagcacactgcagaaccggaagctacctggatgcaagggcttaaacccccttcacctgggcctaggatgtgttgtcgaggtcgctggccaggttttagccaggaggtctcgcgctaaaactttttggccccgcctggctgctgtgtgtgacatggcctgatggagaggagctggagagcggaggaaaacgtggatcccagtgagaactaagggccagatttagggagaaatagtgtctggatggcagtaagtctgtaattcacattttgtttacaaagggagaaagggcagggctgtaggtttgagaagccagaggtttgcgcggagttccgtgtgcccattccccgagagtgccgctcttggctgtagttgtttgttctacctgattttgcctcttgccttcaactcccccataacccctccccaaatgtccagagggcaaacatatgcgcatacctccctgatcaatccagccagaccaaagggccttccctgtcctccccctaagaacttaatgggaagagtgtacgggggacctactcttgggacatctgcagggcggctgtaccaggcgttttacctgactttattcttaccgcaaagatttccgtctcggtacctggtgccccctcagagtccactacacaaacgggtaaaatcccgcgcggctattcatttcgccattcgcgagtaagaaggggaaaaggagccgcttctaggagagcactgaggtatgctcggttcggttcccgaggaggccagaagcggccgcggcggcgcgggctggagctccctcctgcagggagacaccgcgctctagggtgcgggcttcgccgcccacatccagtggtcgaactgttttcacgctagactagagggcggaaaagtctgcgcccgcggagaaactagaattctgtagaatgtacactgtgtagaaatcttttcaccccactcttcagagttgcagattatctttgaaaaacaacaggctctggccctgccagccctagtaacttctacccgcctgagtcactctgaaaagtaagcccctaggccagtgagatgtccccacctttgggaggtgccgcctttccgggaacattaaaaaaaaaaccctaaaaatagaaggaggaaaaatgagcaaaggcggtgggacgactcaccgaaacaccgaggtgcaaatgtccattggagaaactggcagtcgcatggcagccagctggctcacccaatagctgggtggtaaccttgtgatccccaaacatcccccagggccatgaaggcagtgctgacccccacgattgcacctcaggcccggtggaatcccgctcctcctccatagtggtgctatgtaatcagtagaaaatcagtagaaaagctcccaaatgaagctgcttcaggtcaggggttagaaatctgcctcagactttttgaactcaaggaaatcgggacatctgtccccagagctacctgtgccccaccccaggatcattcatgaccttagctaccgggagctctgcccggataagtttttaaaagagagagagaaagaaaaaagtcacatgcaggcaaggctaggaacaggtgtgtgctgtggggacgggcacttggctcgcaacacaccacacaaagtcacgaagtctgtgccagaaaggagtagccaaaccaccgccgggaggcagccgaggttgtgtttaaggtggcgattgagggcagtaggtgacaactcgacccaaagaaggccaagtcttgtccttatctggggtggccactgagggaaaagacttaagggaaagaagttgtcttcaaagctaccattacaagatgaggagctagagtgggctcaggtcccaggcacccagggcttaagccttgatgttggagaggttctcggagggaggcttgggccacctggagggactgggcactctgagtagtaccctctgggaggctgtaccccctttcaaagtgtgagggcatttgcccaaggtgtaggcttttagggagcccagggctgggcagcaccaggggagagaggcaccaggtgggtgccctcctgcctgcactcacctggaatgctggcatatgggtttttcgccttcctcacgcctccccacaccacattctgggctaggcagtgtcgaggaggtgccttgggttcagggaagcttgccacctgcacacctgaaccaggaattgggccccggaatctcagcccctgcccaagcaggaaggatagggaccctggccctcgccaggtggtaaattgtttgctaaaagtgcatttacacggcggcgaagtttgtttctcttttaccggtagctttgttttaacgaaccagatgttttgtctgtaaattctcccaagaacttttccagttttgacgtgaaataaaccttcgaaaatcagaagagtatattaataccacttctgtggggcctcaggagagctgagtcaggtgtgcctggatgggagctgggggtgggagtacaatctttggagagaagtagggggcttctcttggcccaaggtcaagaattggtttgggggaggtgaagtgcctccccgactcccaaaacaggcgcacacacacgcattgtcacaccagagtacgcactcccagccctcctccaaccaggcatagcttgctacttcgtaaatttcttgtggcttggggcacagagatgtagctcaactttgcagactgtgtccactgcatgccgctgccgttttccacgaggaccgcctgactgaaaggcaaaggggccttcgatcttcttcccggggcagctttgatgcctgagtgtgcggggccggggccggggccagggcagagcagggtggaagctggtgcccctgtctggcccacccttaactcctgggcaccactcgattcgggagaacttggggtggaagccgacctggtctaggaagccacagcctgcaggtccccctctccaatgcctcattttttccgatttaggatttccaggcagttataaacaccttaaaaaaaaagacccacttaacaatacacctaaaagagggagggaaggaaggaaggagtacggttatcacaggcgtgtggggagagggaaaccaggtctgcctagaaacccaccttctggtcctgtgagtcatagcggccactttctcgggtttcccaagacaggagatggcgattttctgctccctcccctctccccaagctttccagtgctctgagtctcacatcttcagatacctctttcttccttcattctctttcgttcaatcatctacggaactttcaaaaactttttttttaggagagcgaagattaaataaagaaaataaaacgtctttgtatttcagtctaaggaggacagatgcacattaaactcagtttggagcgcttaactccaggcgaaatgcccttttatcaaatcccacgcgtcgacttgggttgcgctgggaatttcacgaattcctcgctgcagcgtggcgtggtttacccccacccccaccgccaccccactttgggtgaaatggatttttggaaaccatttaagcagagctaaaaataagggtggggggatccctacactagagatagctgcagccacctaggggctcacccctggtcgggagcgagcagctatttgctagttgtagctcaggggtgcccaactcttcccgtgtggttgcgccagctgccccgcactgcaggtatctgaatcattacgtgggcaacctgatgcggctctgaaccccagctctttgaatgctggaatcctgaaggaggaggattccaccaggtcttagccgaccagatagcccagctttctgaggctggtgacctcattaactggccagggaatttgcaagaccaggaataatcacgtttcccagttcttctttcctacattgcttttctcctctgtcttcaacgttagggttttgtgtttgtccctaaatttacaatttacaaacggggaagacggagcctaagtttctgcagggcaggtacaaaagagagggacaacactctgggggcctcattctttcacgtttttgtttcttgaaatttgatggatatcaccttagttcggcaataggagggccagggtgactggggacatggtggcccgaagggttagataatatagcatgcaggtagtctctgatctccagggctttgataacaccaagattttcctcctttgcagagcagtcctaaattctgccttctcccttttctgccgcctcttctcttttccccatttctttcttcgtttctttttctgttttctttttgtgtgcctctcttccaacagtccctcctccacctttataagacttctcaaaggttatttatttaaggtctaccaagtgctagccccaaacaggtccagtccttctacctgtggcaagacggaggctgttaccgcgtgcaaatagtgagggaacaaagtagtttggagttttttgcagcttttttaggtgaggggaagggagggaggtcagaaataggttgacacttggtttgaaataaaagagcatgttaagaagtttcgaagctgccaataaaaccctttaagtggcttgtgattcagtgcctggagttgcggggatggcattggtaaatgactctaatgcccaaagaaaaatattacaaatgccgctgtctcggccaccaatcgggcgccgctttcctgcgcgggcgatggctcctctctggcgcggagggcacccacatttgcatgataaattgaccagactggcggcagccaatgaaatattcaaattaggctgggtggcggtagtaggggtggagtccctggggctgccccttggcgcggcggcgggagcgggcgctaccacctctccgtcagcgccctctggaggcgggacagcgcgggcggccgctctggcccaaaagacgagatggggggttgggggtttgggatgcaagggggtttgggaggggtgatggtggggtctgggtggtgcttcgcggccccaggaggctttccggctggcctcgttgactaggcgtacagcagcgtctccgcatgcctcttgcccttaaaagtgttgatggattgcagaagtggatggtgaccccaaggaggggtttcagaaaggctccagcctccttcgcccaaccaccttctctaggttcccctaacaaacccatcacttaagttaaaaacgtgtatttgctcttgttgacttagctttaagacaagattcttgcccaccgcagaccacatggccagctttcccaaaggccctctgataatgaaatggtggagcagatatatcaaactttccatcttgccctgagccaacgaccctgcaccctcacaggccagggcactctggagggcaccctgcctggagccccaaaccttgggtaagctgtgggagcctaggcaggggcaggcagtgcctggaggctggcttcagacggcagaacttctcacctgggaaaatgctttctggaagaagcacccaggcctcaaggcagctccagtgagggggcaaaaagggatatacataaggcataaggcgctggccatggttaggtaggtgctcagccaggaagatagggcagattcacatgggggagattggctcggtgatgagaccacttctgactccaccagaaccaggcccagctcttcctggaggtcctgactcaacggggacttttgcatgggagccaaagaacagtggatgtctcttgtccgctgatcatctcttcccttcccccaccccatattccatcccatgccagatccctaggctgtgcctgttagagctactgtagcaccacatggacttgcctttaaagcagaatttttagaagtgcagttgcttttctttactctgctgtgggatgctgaacaccttgttctttctccagctcagcagggcttggagttggttcctagctatctctgggaatgctcgatccccatctctgttaccagccaaaagggtctgcgggaggtggtcggcactccagtcagcagccctctcagtacctcttccccagacatagtcaaagcaagtcattcatctgcagccagtctcccctgcccattcaccaaggagaacctggggataggaccactcagagcctggcccaggctggctcactaactgtgtgtaaatacacacagcggaaagagtaggtgctgaacacacatgtgtgagagagtgaatttttactctcaatcaccttatatatattatcaatagtttcaaagtatgttgcccaaaggatgttaattcctaagaaggcttttatatcgtttggagttttgaggagtgtgttggctgaagagaagagggtctggccccagtcttgatgggaatgcatggggtaaacagctggtggcagaggtacaaaaggggcctctctactttctaagagaatcttccatcctggctgattttaggacctggggtggggttcccatcaggaggaggcctaaggaaggagtaggacccttcctagatggctgagtcaacttatacgacagggcagggaaacctatcttggaaacccgggagccctccttcctcctccccatcctcaggcctcacctgagacttgaaaatggaccagagtcttcctccaacagtgaaattcgttaaagagtcactcctgtctagaatgtgcagaaatgcaagcctctctctttctctctctctctctttctccaccttgaggatgctgtatctagagcccatatagggacaagaaggtaagcagtgaaagcaggaaagaagtagaaggctggctgtcatccagctgtgcatacagtcctatctcagctgaactgtgcacggtgaatgaggaagtaaatgacaggtgaaggaccaagagagtgaagctagtcagtttatctgaggagataggtatcagtgagtaactgtaaggatcacacccacagtgggtgtgccccgcagatggatatatgtgcagcaagcggtaccttgcgggggaatgcaagctccaactgtggtgctgagcctctggcccataagtaacccagtgagcctgagcaggtcactccctctctttgaaccttgtctccatctctaaaacaggacagctttctccatcttaaacaccaagtaggaattcattgtggaaaccttccatcaaaattggagatgccttggatggaccctgtggtggctcatgcctgtaatcccagcactttgggaggctgcggcaggcagatcacttgagtccaggagtttgagaccagcctgggtgacatgacaaaaccctctctccacaaaaaatacaaaaattagctgggcatggtggcatgcacctgtaatctcagctacttgggaggctgaggcaggaggatcgcttgagcctgggaggttgaggctgtagtgagccgagatagtgccactgcactccagtctgggcaacagagtgagaccctgtctcaaaaaaacaaaaaatagagaaatagagatgccccttgaacccatgggtttttgggactacattctggaagctttcagagtcagaccagagtttgaaagaggcattgtgtcactagccgtgtgcccgtgggcaagtcacagtagagtctacttcccacggcacttgtgagactcatctgggattatgtgtgtccatgccttggcagagagcttggtgaagaatgttagttgtccaataaatggtaccccattaagttggtgtgcagggtggccacagggccagaccaccctgaaaataaaggcttatatttgggctgagcctggatgcacctgagattacaagcaggtgcttagaatgtggtgaaaaagaaagacaggagagaatggctgaaggcagcatgcagtccacctgactttctgggaagattgggcatttgcagggctgataagtcaggttcttccgggcctttctgtgagctcattagaggaaggggtctggtgactgatatttctattttccctgttagtagcgactggaatttgcaccatccaggtcagatggaaaatagaaggcgggaaaatctgacagtctcattgatttgctctctttgccatcaccactcttgagaggaagaaatgtgacttcaaacttgcaattaggaaccagcctgctaaggagtcctctcgtgagctcctgtgctatgcggagcacaggcccatctcatctcatttcctaaggaggtaggttcattcatggtttcagcaggagcaggcagtgcaaacgtgtgacacccgcccgcaaataactgccagaaaggccgtccaatgcttccttcacatttttggtcagatctctgaaaagatggccattctcccaatgttttaaaagtattaacttcctttcaaacatcctttaacctttaatgttttgtaacttgatgaaaaggtcattttgtgctgaggatgcagttgttccggaattgttcagctaacggggtgaattccaaccaaatccagaattatttaatgggatccaacgccccggccacacgcacaataagtgaatattttcccatatatgtctgtgtacaggtacatgtacttgtgcatatgtatttacatatttgtatctatgcatgcacatatactcattgggacttggattcaatggacatttttagccttctcacaaaatgacttatcctttgcaggaaaatagatattaaacttactcttttgaacacattttgctaaatatttgatggcaattatttatggtgcactgtacttattcctgatttcttacagaaggggttgggtcaatttctaattcaacatttcattgctgtctctacaataaatgcctccagaagcttaggagaattgagaggtttttttcctctctcttctttcacagtgtgagctttttaactgtcactggctagagcagtccttcttcacttttaccttccttagctgatgtattcttggaaacagatggctgagcatgttagatttatatttaaaataagagtagagttaataggctcaaataagagcaggaaggtattttctacaaggaaactgcatgaagtttatgcctggactctggaagatgtgttaatacttttacttattcaagaggcattgggttgtggtctgctatgtttcttgctctgatgactgagtttttaagataaaggctctccgggcaaataaggaacagttggatagagtagctcaccttaagtctctatagactcatgtagagaacaaatctgatctaaactgtgtaaaaaaatgagtaagagaactctataagattaacactcttattaaacttaaaagagaaaattggtactttttttttttttcttagacagagacttgctctgctgctcagggtgaagcacagtggcacaatgtcggctcactgcactcacctctgcctcctgggttcaagcgtttcttctgcctcagcttcccgaatagctgggattgcaggcatgcaccaccacacccagctaatttttgtacttttagtacagacagggtttcaacaggttggccaggatggtctcgaactcctaacttcaagtgatccacctgcctcagcttcccaaagttctgggattacagggcaccaaaaattggcacttttaaaaggagacaagttttacttaaaagcaaaagcctttaacaggcctttggctggattaaatgataatgaagcgaagcaaagcttgtgaccactctgtagagccatccagatagtctctctttggggccagatcctctagaatgcatgatttagggtcattcattgcacattcctggcttcagactggttttctgaatttccctgcaatctgatttttgtcttcctacatttctgtgtgtgagatacatcaaaaggtaaaagaatgtgtgaatcatataggtacggtttaaataatacctgcatacacaacactcagtcacctgaaaccccccgacacctcccaattccagtcccctctcctggaggccacctctatttttaatttttgtaatgatcacttccttgccttactttgtagttttaatatttagatgtgtatacctggtcatgttcataaatgaaatcatgttgtatgaattattttgtgtcttgtttctcttactcagcattgtttttcggacttaaccatgtggatttgtgttgctggttcatggtcaaggttctagactatgaaaacattagtttcatgaaaacattaggattttttccccccaattgtttggatatcatgaagaatgccgctgcgaacatgtttgttcctatgccataactcacatggggaatatctcctatttatatatagttaggggtgggattgcttggtcagagtttgcatatctgcagctctaactgttttccaagatgattgtgtcaattttcactcccacaagcagtttttaaagttcccattgttctacatccttgccagcctatgatattgttagcaatgtttcttcgtatttgtaatgtttcctaatctagcggctgtggttgctgtctcactgtgtttaatttgcatttccatgattactaatgagtttgagcaccttttttatatctgcgtggtgatcgggaatgccttatttgtgagatgcctgttcaagtcctgccattatccgttgcatatatgtttcacattatttcacccaagttctctgttgcccaggtttgtttcagattggtttgggacagtggatcagatcagaaatgtttcagtgacatctctcactatatttcctaggatgcttttatctgtgagaaatacgaccccctgctcacactggcttaaggaaattggcaagaggtagattatggctccattatattaacaggaagccagtttgctctgccttcttactcttcgcttcgttttcggcataatctcatcctcaaggtgttttatcttatgatttcaagaggaccacaaatggcgagtggaactaattgcttctttgtccacattccacaaggaagagaataatagaaaacttttcattgacccatgtaatctaagtcatacccttcagtttccaggggccacgtccatgaagcaggaggcatctgcagtgaatgccatgccctgacgccttactgagcactcctagtaggacaaaatgagtactgtatggggaggaggcaacctcaaacaaccaccatgcttactgccaagcctataggatatttttaaattcattttttaatttgcatataataaaatgcatttttttgggatgcagttttctgagttttgccaaatgcacaaaatcacataactaccactgccatcaagatttggaacagtggctaggtgtggtggtggcttacacctgtaatcccagcacattgggaggctgaggcaggagcatcgcttgagcccaggacttcaagatcagcttgagcaacatagtgagaccccatctttacaaaaaactttttaaaaattagctgggcatggtggcatgtgcctgtagccccagctacttggaaggctaaggcaggaggatcacttgaacctgggaggttgaggctgcagtgtgctgtgattgcaccgctgtactccagcctgggtgacagaggaaaaccccatctcaaaaattttttttaaaagatttagagtcgttttcttttttttcttttttttttttggacagagtttggctcttgtcgccggggctggaatgcaatagtacaatcttggctcactgcaacctccacctcccaggttcaagtgattcttctgcctcagcctcccgagtggctgggactacaggtgcccagcaccacacctggcttttttttttttttttttttttttttttttttttttttttagtagaggcagggtttcaccatgttgacaggctggtctcgaactcctaacctcaggtgatccaccctttttgacctcccaaagtgctgtgattataggcatgagccaccgtgcctggcctagaatagttttcttactcccccaaaactgctttatgctgcctttttgtagtcaaactatctgcctgcccttaaccccagctcccccgcattagaaaccactgaacctctgatctgttcttcaccttaaagctttcccttttccagggtgtagcgtatgtggaattatagagtatgtcacctttcaagtctggcttctttcatctagtgtaatgcatttgagatttatctatgttgtcggatgtatcagtaagtttgtgtcttagcagtgctgagaagtattcctttgcatggatgtacccagatctgtttatccattcatcagttagaggacaactgggttgtttccagtttggggtgattacaaataaagccacgatgtacaagcacctctaggttttgggtgaacataagttttcatttctcttaagtttcaatacctaggagaatgattgctaggtcaatggtaagagcgtgtataatgctacaagaaagtgctaaactgttttccaaagtgagtgtagcattttgtatccccgctagcaatgaaatgagagctccgcttgctctgtaagaggcattagtgaatatgaaagtgctttgtaaagactaagggtgtctcacagtgtgcccaggcgggaggattcagagggggcatttctaaactctaaactcctgtgggctcctagcccatccttctgaatggggacagaatacttccatttccaggttacttgcttctccaaaagggagacagggaagtatccttctctttttgcaaatgagggcacagcactgcctctcgtggttgagccagtcattattcagtaggaacagcagtgagattctccagccttctattttattcctggggtcacagagtaaaatgcagcgtgatcatttggagcattcttatgctttgtgacaagaacaaagccagtggaaacagccatgtgtccaatcagaatgtcagagctggcagggaccttagcaattgtcactttacagatgataacctattacatccccaggtccccagaatcccagcccaggactcactccctcagccttcctggattgtcctgggtggaacaagatcagctcatttagcacatagtcttccagaacacaaggcagtgtcccaccaaggttggatgggaccagcttctctatccacagtagctgtgcacacagagacagaaatgaagccgtactgccgggtgcaccgtggccagagatcctccttcctggtatatactcccggagccattgcttctttcatttcagtgcccatttctgaggcaccttcacatttcaaacgtcctgagaatatgtttaattagaacttggccatacagccttttaaaacaaaacagaagggaccagctaattatatcactcagcattctgtggcaaacatatattttttaataaaacactttcctaaccagagtaatccctggagatgcaaatcctcatttataagaagtttcccaaagggagttaaagagaagatgccttataaagaaaagagacaaagagagtggggaagtgttttcaaagagcttttaaaagatacactcattctgaggttgaattacagatattttaagggtaccaaattttatttcagatgtaatcctttcctgtgtttttgatcatgtatttccgttttttccctttttgatcattgccacaaatgcccatatttctctttctggtgtctttcataagtgcaatatttaaataaacaagggattttcccaaaatgcacctcatctcctactctttgtcatttccttgtcttgctctgtaaataaccgtgtgtctcacagcagagcttacacagaatggatgtggggcagtctgtggtcctggggagggccttccctgtaatctctgcagcccaggacagggagagggaagatttagatcctgctgcggcatgtcttcaggagtggaggtcagcttgggacatttacgttcatgaggcagccgcagagggtcagagcaataattgtgccagctgatgtttgctgcggggtttactccaagccaggccacacgctaagaaattaggtatcgtacctcatttaatcctcacaatcctcacaaaatgtagttgttttgctccattttgcagatgaagaagacgaggcttgagagacgaaggaatgaatgaagggtctcacagctgttagaagggttagatcttgtatttggactcaggtctgcctgccctggaacttgactctcccacacctggtgctgggcacactaggagacgtcacaaggctcagagatgccacccttcctagaacgggcgccgtgcctctcttctccacacactgcaggggagacaggcactgtgttttcagataagttccatgtgcatcaggggctcggtgggaaagggaggacacactcagattaggattattcatggaggattctccaaagaggctatttggaaagacggagggaatggtgaaggaaagcacaagagaaaatggacagaaccgttacttcctcacgcctgaaggggatgggttactggaagccaggaggagagtgtgataagagccacttttagaggagctttcaccttcaggagaaagtcagggcccaagaagacccacagggaggtgaccagggaatggcatacttggactaccctctcttctgttcctccactctcctgccagggctccacattggataaacccctgcaggggcgagtgaaactgccacccaggtttgcctcccagggcacagcccatggagagctctaaggcaagtggcagaaaactagcacaggtgcagtgcgtcttgcaaagcacccagcctatgccggccctgggctagaaatgggaagagaggagaccatggcactgccctcaaagatcttagagtctgtggaggagtcaggcagagagagggggtgttcccttggcaaaggactccatgagcagatgcaggccatgggcgacgctcctgcagaagctttggggtttgccgcatgtgcctggaaggagcgcgcccaccttgacatgcctcgcctcctgttgccattgacaacgtgaaggcaaactcctggggctgggcctttttccttgagataaaatatgtataattctctgttatcaaatgattattaaacaaaatctaattgaaaaaatagaaagaagaaaagataagtcatttatcatcctgttctccaaagacaactgtgaacagcttggtggaactccttccagtggctttccttggagctttgcctctgtggatgtggtaagagtcggatgcgattttgaattttgagattttgattgagcattgttgtagtattttgccatgttatgataaatcattggcaaacatagtttttgacggctgcataatattctgcataatattcataataatgaatgctagtatagttcatattataattcttctactgtatttatttatttatttatttttgagatagagtcttgctttgtcaccgaggctggaatgcagtggcgcgatctcagctcactgcaacctccacctcctgagttcaagctgtcctcccacctcagcctccttcaatagctgtgactacaggtattcgccaccatgctggactaatttttgcattttttagtagagacggggtttcaccatgttggccaggctggtcttgaactcctgacctcaggtgatctgcccgcttcggcctcccacagtgctgggattacaggcatgagccaccacgctcagccttcttctactgtttaaatgtttaggttatatcctgtttcattaatattaaagaatgctataattaaaaactttgtgtatagagaatttttccatgtttcagattatttatccaggatgatgtctctaaaataaagctactagaggttgaagtatctagcccagggccagccacagaatagacacaacttggttgataactattgttgttcagtggtgagtgtttatgtaaagctcttctgcaattaagaactgctccaaagtccttcctctagaacagcgcttgaatatgatgtgagccacgtaattctcaatgttataataaccacatttcaaaaagcagacacagttgaaattaattttaataataccttttactggagctgggcatggtgtcaggcctgtaatcccagcactttgggaggccgagttgggcagatcacatgagcccaggagtttgagaccaggctgagcaacatggcaaaacctcatctctacagacaaatacaaaaattagccaaataggtggtgtgtggctgtagtcccagctactcgggaggctgaggtgagaggatcacttgagcctggggggttaaggctgcagtgagccaagattgcaccagcgtaccccaacctgggtgacaaagtaagaccctgtctcaaaaaaaaacattaattaattaaaacaaacataaaaatacattttacttaaccgattatatctaaaatattatttcaacatatgattatatgtaatcaacataaaatttatcaatgagatagtctacatttttttcccatgtaaacctttgaaatctgatgtatagattttatgcttacaacacagctccattcaaaccagcctcattcccagtgttcagtagccacgtgggtgcctgatagccactgtggacagtgcaggtctagggcaaggaacccaccagagatatttgccactgttggcatcttcacctagccctgaaatccagccaccttttaatgcctccccgaacccccttactggcgttctggactgagggtggaccgggtggccaggtgtgacatgacttctgtacctggacatttttaccagtcgtcctcattcctgccttgaccttgaccttagccaatcacagcatccctctatcccagtgtgcctggcactggttcattcagagacattgcacacttcccgcatggtaagccctgggcctgaccctagggatacaggtggacaaacagaactttcttgtaaaatttaattacagaacttgtcagtgtttttacggtctagtgggggagacagactttaatcaaatcatcacacaaatatatatagtttctaaatgtggttaagtgctacaagggaaatgcacttttaaaaatgctaacactgggtcatggcatgagtggcccgccctgaaggcatttaataaaggtggcccagcccctggccaggctgtcttagggaacattcatgtgaaagatgagagtgagataagaggatctcagtttccttctggtatccagggtccctaagctacattaacagagtttctaggacagacagtagctcaccggttcctgtgtctggggcccagttgatcaatttgttgtttgtcatctctaaaaagtattgcggccagctggaacataaaagtaatgaggaaacaggccaggtgcagtggctcatgcctgtaatcccagcactttgggaggctgaggtgggcgggggatcacctgaggtcgggagtttgagatcagcctcaccaacatgactaaaacctgtctctaccgaaaatacaaaattagccgggcatggtggcacacgcctgtaatcccagctacttgggaggctgaggcaggagaatcacttgaacctggaaggcggagattgcaatgagccgagatcgtgccactgcactgcagcctggggaacaagagtgaaactctgtctcaaaaacaaacaaacaaaaaagtgatgaggaagcagaaggctacccattcattcattcattcattcatttgttcctgtgttcacgcagcaactctcagtgagtgctctgtgggatgccaggcaggctctgcacagtcagaatggcaaagtcagccttctctctggcagattacacactgccaactgaacacacttttccggggaacatatccacttaaaagagaggaaaaatcaatgctaatagaactccttatctggttccaaaaatgacatcgtccgtagtggctgatgctttgagcccatggctgctctggaggcatgagccctgcatggacacaattttgtaagctcctcgaacctggccaaatcaatcaatgagaggctgcagcatggagagagtctgggttccaggggcaaactgtaccattcctcttctaacctgaaacaggacggagaccctcccttcaacctccagcccctagggacagggtaatttcagctgcacctgatgtaccctatacatcactgtcttctccaccagctctcaaattaaactctgatgtataaagttaaacaaaaatgagataaaatttggcagaggttgaagagggtcaaagtagtccaaacataaggtagactattgcttcttttgatttatgttattctgtacactgagaaaaaaataaaattataaatctccccgagactttctcattgagaatgaggcattgctaattgattttcaatagactcccagggttttcagctgggaggagcactatagctgttgtttgtagtgaagatgccatggttcgacctcggacatgtactgtgatgatgtaaaaatatcctgcaaaattaacatctgcaggcagtgatgttgaaaaccaccctgccttacctggctcatgtcacagaccacagtgtctgtccttccttattttcttatttaatccttgcaaacccctaatatgtgacacacagaattcactgtccccttttggcagttagggaaactgaggcttaaagaaaccacgtgtcttcagtaaatattagcatgtctactaaatggctgggacacagaagtgaacaagaccagtaccctctcctagagaccttcttccagtacaagagacgataatcaagtcaaatgactaaatataaaggattattagtgtgtagaattaattgtgaggaaatggaagtgggaaaagggatagagaaaaaggggtatagaaagccaagggagggccttaacaagggaatatttaacagtaaaacagtaagatttacttttttttttttttttgagatagggtcttgctctgtcacccaggctggagttcagtggtactatcaaagctcactgcagcctcaaactcctgggctcaaacaatcctctcacctcagcctctcaagtagctgggattataggtacacaacaacacacctggcttattttttaattttttgtagagatgggatctcactatgttgtccaggctggtcttgaactcctggcctcaaaggatccttctacctcagcctcccaaagcactgggattacaggcataagccaccaagcctggcccaagatatacatttttaaaggatggtgaaggctgctgtgtgtagaactaactcagggggacaagggcaacatcagagagaccagttagtaggctgtgctcattttctggacaagatatggtggtgagttgggccaggtggtggcaggagtggtaggttgcagagcttagaacaattttgaagataaggtgtctccaagggatctgttcctgctccgttgctctttccacagcacgctacctgcagcttctgctggtatcactgcaccagactctggagcacgctgcttctctggaggaggataaagacagggaggctatctagggagataagactgcaccagcaggcagcaggggcttccgagaagagggcccctagtcctggctgcgtatgtgcttgtgtgtgtcacttgcgatgtgcataatcatcttcagtcttatttttcccaggtaactgcaaaaggtaatttccagctcatttagctctgttctttccctaagctcctctagtctggcttttgtctctgccactcctaccaaaaccactctgctcaaggccatgatcaatgtctccattgcctagtccaggacagtcagagctgctctgggacagatacaccagatgcatgagtttcctgatagagcaggatctcagtggaggctcgatgcccacctgcctgatgctgtgggatggatttctgcacagatgcaacctctgtgggcagaggccaggatgaggcttatgtggctgtgaagacagcctttgatctgttttctgatgcaaccacagtgctgcaggccctgcttcatcttggaggtttgatgagtgcagacatgagaggtttctaggtagagctgagccctgggctctcgagtctcctctgtctgcatatctgcatgtggttggcaaagtgccagccaacctcagtgcaaccctcaccaagttctcaaggaacagcctctgaaagtccctctctatgctgagttctagggaaggaaaaggaactcagggaatagaagagctgatctgcccaagtcatacatttcttgggggcacaggaggactacatctctcatgctcacttgaaattaactgtggccactcaaattaaggtttaccagatggaacatgagcgggagtgatgtgttctctctaaaggcctaacccatgaaaaacctattgggaacactcccccatgctcttttccattccatgagctggatgcagatgatggcaaggaactagggtgaggtggaaccacaaaacagagggagcttggatccctgaatgaccacatggacatacacatacaccaaagactgtcttgtaagcaagaaataaacatctactgtatggaacctttgcatggagggtctatttgttatagcagcttagcttaccctgactaatacaatccctgctctctgagaatttaaaattgcttcaaggagacaagactcactcatacaattctggaatggtagtacgtggcttcgaagaagggtgggttgtaaggtttggactttcagttctgaagtcacaagctataggcccttgggtattagactctcctattgaaggcctttttctggaaagctggaagatagactggggagaaggcccttctggaagaggacacattacaatcaagggttcaaaagtagggcttgaagcaagcatagatgagatcaacaatgttaattcctagaaaatgaaaaaggaaaatggcctttaaatacctaagagctttgactgctgcagggatgagacgaaggccagactttcataacttctctcctgtgacttcacacacctcagaagttttctggtgaggagccctgaacctgggtgtgtggggagttggtgtcagcttgctgtttctctcccatgccttttctcctggctaggaaccccacttgttgtctgttttaaccaataacttagctcagacttgaatgcttgattggaacagcaagtctccagctttctgcagaggtctttggggacaggaatatgatgaagtttctgagctgaggattctaactgagacttccagctctcagctgaacttcagacgtgttctttacagtcacagctgtgaagcttttcagggcaaggccctgaaaagctcagcttggatctgtctgtccctaccaggttctgggggaagggggaggagagcaggcagaacactcccagtttacagcccagggatgctgagtcctggggccaaaggtgttgctcatcaccctcgagccctagaagtggcaggacctcaggagaattcaaagtggtcttcctcttaggaaagataaacacttattccactggttctcctcttcctggacactccactcccttcttcccagactcacacacctcctaactgcaccccaatgaatggtgcttctctgggtcccccacagacaaacattggggagcagccactaaagacttgggttctggttccaactgctgattttgattaagggtgtgaccttggccctcttcatccccctctcttcttcccctgttcattcacagctgcttttgttaatattcatggtgcattatgtaactattgttcacagttgagccaagtagtgtactagacttgcttggttggtttcattctccttttgttttccctgaagccaataatcaactcattttcatttgcttggtgttgtttgcacagatgattaagttttcccttacctacctgcagcctgtcaagacaattttccacaagattgaacagatcagaaaatccactgggagcagtttcttcttcttcttggaggtgtcccctctgtaggcctctgacgttccagttcagttccctgtttgggcaacagcacaactatcatatgggcttttcttcacctccagcttggagaatttctttacttctctcatccattggatccactgcttcctggagccgatgcctttccctccttggtttcatcccttcttttgttggtgcacagcccccagcagctgtctgctaatgcagggatgacatctgggggttaagctagcaggacaaaggagcttctgccatttctcttctggataatcatcccccaacaaacaacaacagcagcaaataaataaaacaagaagaatgtgaaagagaaatgcaaatttcattttatacaaaataagcagacagacacaacccagtactgcaaagagtggaaaataggtgggagagagtcgaaggaccttgttctgctaggtgtctgcagcagggcagaagccgatctaccaggcagaaccccagagtagctcaggaatccaagatgccacacaaggcaaagtgaggtgtggcaggtcacaggttgcaggcctccatggggaatagctaggcccccaggttcccacccctgagcctgacaccttcccctgtccttttggaagacgggaagaggatccaggcaagggccagggtgaacacaaaccaaaacgagggggattgggggaagtttactcttgtacacagtcccccagctcttttctgtctggctcatggtccaggagcagaggtaggtcatgggtcaccttttctttatgtcctacaagaggtatgaattttaacacatgcactggttgtgtaaccagaacttcaatcaggatacagaagagttccatcccctcctgcccccgactccctcatgttaccccttttatagacaaacactccctccaccccttgcccctgggagccactgatctgttctccatcactgcaatgttgtctctttaagaatgtcacataaatggagtcatgtcatatgctaccttttgagactggcttccttcactcggcataatgcctatttatttatttatttatttatttatttatttatttattgagacagattgttgctcttgtcgcctaggctggagtgcagtggcatgatctcggctcattgcaacctccacctcctgggttcaagcgattctcctgcctcggcctcccaggtagctgagattacaggcatgcaccaccacacccggcttattttggtatttttagtagagacagggtatcaccatgttagtcaggctggtctcaaactcctgacctcaggtgatccaactgcctcagcctcccaaagtgctgggattacaggcgtgagccaacgtacctgcccaatgcctttgagactcatccaaattatttcacgtattaggaatttatttttccttatttctgagtagtgtttcattgtaaggatgtaccacagtgtgtttatccatccaccccttgaacgacattttgggttgtttctagttttgacagttatgaagactattgctacaaacatttgcatacagggttttgtgtaaaaacagatttttatttcactggagtaaacacccaaaggtgggattactgggtcctatggaaagtgtatgtctaatcttataggaagctaccaaacattttttcagagtggctgtactgatttttattcccaccagcaatatataagagtcttgttgttagacatgtttgccaacacttggtattgacagtatttttttaaaaaatgttatcattttaataggtatatagtggtatctcactatgacttcaagttgcatttccctaacagctaattatgttgcacatttttatgtccttatttgccattcttacatctttttggtgagtgtctcttcaagtcttttgctcattttaaaaattgagttgttagtatacttactgttgaggcctgcgtgttctttacacattaaatattcaagttcttttaaaaaaaaaatacaggggccttttgtattccctaaactggaatgcagtggcatgatcatagtttactgtagccttgaactcctgggatcgagggatcctcccacctcagccttccaactagctgggactacaggtgcatgccatcaggcccagctaatttttattttattttttgtagaggaggggacttgctttgttgctcaggctggtcctaaactgctgccctcaagcaatcctccttccttggccttccgaaggcatgagaattacaggcatgagccactgtgcctggcccataaagatgcaagttctttgatgaataggttacttactattttttttgtcccaatctatagcttctggtttcattcctttaattgtcttatatagagcaaaagatgtttttgttgttgttgttttgtttgtttgtttggcagagccttgcactgtcacccaggctggaatgcagtggcataatctcagctcactgcagcctctgtctcccaggttcaagcgattctcctgcctcagcctcctgagtagctgggatgacaggcgcctgccaccacgcctggctagttttttgtatttttagtagagatggggtttcaatcagttggccaggctggtcttgaactcctagccttgttatccgcctgcctcggccacccaaagtgctgggattacaggcgtgagccaccgcgcccagcctagagcaaaagattttgattgtgatcatggacgccatcttcaaactgattcccgtctccattaatgtgcatttattgagcacctgtagtatacaggtccctgttgggggttgagctttacaagactgatggaacctggtgctcagagcatcctctaagatctttgcccttccccaggggaggaggtgctggtttagacccatagccctgagggaagttcgggacttacttaggtttttcaaccccaactatcctcagcttcaaaccaatgccaccgaattaccccctgagcattcctgtcttacccaccctcctttgcctaagccttgttttccttcactcaagcattgatctcctccttccttcctgggttaaccttgcctacaattcaaagctcagctgggataatccatcaggcctgaaagcttctccaacccaaagtttctatctctctgtctatggccttgtttgattatatcatcttttcttcccacctggtagggttttggggattaaataatatgaagcatatagacatgtgcagcaaaaagcctattagaaagtagattttccatgcaagttgctacaaaatcaaataagttcccagttcctgagaacccaaggtttgatatggtttgcctgtgtctccacccaaatctcatcttgagttgtagttcccacaattcccatgtgtcatgggaaggacccaatgggcataggtcttttctgtgctgttctcatggtagtgaatctttctcaggagatctgatggtcttacaaaggggagtccccctgcacacactctctttcctgctgccacgtaagacatgcctttgctcctccttgccttccactatgattgtgaggcctccccagccttctgccactgtgagtccattaaactttttcctttgtaaattacccagtctccagtatgtttttatcagcagcatgaaaatggactaatacaaagttccctctaattctatgttagaagcctgttttagaagggcttccacgattattttaatgagagcaaactggttcatgagtacaccgggcaacacacgggcactttcacaggaaagttaagagcatcttccgccaaaggagagccagaggccagtcaggaaaaggaaggatttcttaataataggaggtctttcgctattccagtgtcctgccgcaaaatgatagtacagacctggctgctagtcccctagagtgcccagtgcttccttttctagaactgagacaaataaaaagtaaactccagttctggagtcctgttttgcaggccccgttcccaaatgtcagctcctaatgggcaacagctgcctctgtggtttcttctaggcaagtgattcatgtctttgctcagaaacgataagcagaacaaatgtttgcttagacatataacagagggacaattggaaaacaggagactggcaactggaaatagtttgcagctatttgatccatgataattagtctgaattagtcatatggtgctcactggccaggcctttgggccagaggcagcgtgggggaatagacagctggtcttcctggaaaagaagtgcagaagggaacatagcagacacagaggtttgctcagaacacgtcagattggctcttgccctctcaaaggtgacccgtcttgaccatctgccttagttgcactccataccggatccgggtccccagcctggaaatgagtggagaggcagaaactacacacccatgggagatgcctctaaaatccattaacaattttttacacactcagaagttaaagtaaacaataggttgaattttgtgtgtgtgcaggtgggaaaaagcttcaaaaatatccagacacccacattcattggattttaatcttagggatcatgttaggtatactgactcatttaagagatatatggaccttgaatttggaacctaaaagtgggactttgagtggaattttcagtctgattatgttgatataatttaagatcttgtagcctacattatacttatacagaatgtactcctgtggtcatgctccaatacattatttagcagatctatcataaatatttttctttctgtgagaaaaggtttcactctgtcccccaggctggagtgcaatggcacaatcatggctgactacagcctcaacctcctgggctcaagcaatcctcccacctcagtctcccgagtagctgggtctacaggtgccctccacgaccacgcccagctaatttttttttttttttttttttttttttttttgtagatactgggtttcgacatgttgcccaggctcgttatcatgaatatttctatgagaagggagaaaagtcagatacattcaatatttcagccaaaaaaaagaaaagctacatttttgtcaaaaacttctcagaccattttttgcagagtcaggaggaaaaacaaaaagtgaagcccacaaacccgaccccctcctcacctcagattagaatctgtaatattggaggcctctgggagtagaatttaagtcactaggaaggtggacacatcggcaaagccagcccggagctgagtagggcatcgactgctttaccagcaaacatgaacgaagctaattttgagcacgggatattgaaaaactcaaccctcacgtctcaggtggatttttctttttctttttctttttttttttttttttgagaaagagtctcgctctgtcgcccaggctggagtgcagtggcacaatctcggctcactgcaaactctgcctcccgggttcacgccattctcctgcctcagcctcccgagtagctgggactacaggcgcccgccaccacgccctgctaattttttgtttttttagtagagacggggtttcaggtgttagcctggttgttagccaggatggtctcaatctcctggcctcgtgatccacccgcctcggcctcccaaagtgctgggattccaggcgtgagccaccgcgcccggccccgaatttttctaaatacatgataagaggttgtaaatggggtgacctgctcctccctccttgcccacgagcagttccaatggggtgtctctctgcttggggctgaagcagatgtggctgcgggaggggaggtaggaaggtaggaacaggagcctgcaagagagtggtcttccttattgacgcagacgactgttggtttcaatgttcccagcctccctttcctccttcttctgttaacaacaccttggattttctctgagaaaagcacttttcccatattctcagtccctggtgcttggatgggattagaaagggctcttcctcctgcctcccctgcacccccattccagggagaacctggggtccagctcggtcagccagcatcctccagccaccaaggctggcaccagaagggctgctgaatattggatgcaggacttgggcctcatctccagcgatgcaaagcagctttctcccgtggttgctgagaggaggctgcggtcctggggtggtccatgggccctggtttcctccacgtccagccctgctgtaacagttctcacgacacagccgaagcctctggacccattgtgctggacctaccctgagaaggctcagttgactctgtgcctaatctagtttgatacttttgtctggttgtttgctcttaccccttgcaaaagacagtgtcatcacatgcactcatcttggccaaaggcggtgcgggaggaaaggcatggagatgacgccagaatttaggttccactttttgacactgagacctcccaaggggaaccgcaggctctcagtgcggaagccccctccatagctcccctgacctgtccagcacctgcctccagaggtgaggaggggctgtgcaagttcctaaaggcagccaccatggacaggtctcaccagtcccaagtccttcctctaggcccccatccacctccttggactggcagcagtgggtctcagctctcaggccccagaagccacactgggagtcctctgttcactgagaggcagcctgaaccacggaaaggagagacctgggtctctccagctaaatacccccattccctcctgctgtgcccatggctgtggcaccagggcctcctgccagcaggaccaccatgccctctgtgtcctctgaacacctccactcagagctgactcagttcagcaaaggcggagcatgaacttgtgaggagagacactaagcaggctggagtagctgaaacatcactttccactgctccctgggaaacggccagaaagattcctgccaggcccggaatccctgcatgcacttgatccccaagacctcaggaccctcttgccctccctctctgcacgacatttgctcttctctctggaaccctctacccttgggcatctcggagttggcttctgcttatgctgtttttcggatctcagcttgaaggatacttccttaaggatgactttcctgcccacacccaggccaggccactctgttgcaagattttgcacacttattcattcatgtatttagtattttggggcgtttgttgtttttgaacagcacttgcttattcttcctgactggatgtcacctatggccccagctgacatttctgtgtctgtctgtcactctgcgggtgtctgtctgtcactccgtgggctgtgttaaggacagtcttgtactgcactgtgttctcagcatccagcatatccacgtgggctcacagtgaacaaatgaatgcatttgtctgatggttctttttgttctgttttgttttgttttgagacagagccttactctgtcgcccaggctggagtgcagtggcataatctcagcatactacaacctctgcctcctgggttcaagtgattctcatgcctgagcctcccaagtagctgggattacaggtgtgcatcaccatgcctgaataattattgtatttttagtaaagacagcgtttcaccatgttggccaggctggtctcaaactcctggcgtcaagtgatctgcccaccttggcttcccaatgtgctgggattacaggctggagccactacacccgtgcagtctgatagttcttatatgcacttcttactctcatagtgtttttaaacaatttttaattgatgcctaatagatgttcatagttcttccatgacttaagctaaatcttgctcttcctggcctcagatatgtggccaagactcacatcctcctaaaagccattcccaaatgacttcaaaaaaaaaataggaggaggaattcaggaacaatccataacaggcaccacagtgaaacgccaggtgcagcaactctggcagaggaagggctggtctgggaaggtgcagtgctagggcgggtcccagaattgctaagctctgtgtccttggagagagggacaggggatggtgacagcttcaggccctcttacaaccgagatgattgcccctggccccaggattttggccgccttcaggagcagttggtgctgcagtacgtgctgcctcgggttgggtactgtgagctgccatcaccctgatgcctccatgggctgagcagaagacacgccgatgtgttttgattcatagcaggcgaggctatgtacattttaccaagaagcctgaatgtaaaatggacggatgttactatcagacacaacagggggcctacaagtttctaagtgcctgtgctgtaagtctgtcttgaacatatagcccagtttagcaatggagctggtgtgaacagctgtgtgtgtgtgtgcatgcacacatgcacctgtctcttgcacactgtctcttggctatggctacaaccatcccccaaggatgagataggagctagcggatggagcacctgggggctgggccagagcacacctgcaggtcctcagcctcacaggagtaatttctgtgggtctttctgctgcctaagttgaggatctacttgctggccactcatgcctgtccagcttttaaaacaatatttgtttacctttttctaagtatataaagtaatacatattcatagtagaaaatgtagaaaatttaaaaatgtttaagaataatatcatctgtaatccctctactcagagaaaatatattggtgcatttacacccagtttttcattaataaatattttgtaacaaaatttttgtgacctagttagtatgaccttattatttatttacttctgtatcttgcttaacaatatatcaagaacagtttcatatcattactgttccctggaaataactttttactggctgcatagtattccatcatttggatatattactatttatttaacccattctccaccttggaacatttaagttgtctcaattatcttgcagtagacagtagatgtaagtgaatgctcttatatacaggtttttgtgagtttctgattgtttcttaggaaaaccttaagacctttgttggaccaactggggaagaatttctttcctgctcaggctgctcagctgatagagtgctggcctggagcagctgaaagacactttgctgctttctggagaatgaagccactgggaaaccacataggagggaagagagagacagcttctcgatgatgtcatctgaacacctggatcctgctgtgcctggacttgcagtcccattgtctaccaatatagttcattgaattcaacttcagctggatgtcattcatctgcttccagaacttgtgtctaatgcagagctgaatgcatactctcagagttggaagtggatgcaatccacaaatctagcacccaaatttcttttttctgttcttttttttttttaatttgagatggagtcttgctctgtcacccaggctgaagtgtagtggcgcaatctcagctcactgcaacctctgcctcccagattcaagcgatccttctgcctcagcctcccgagtagctggaattacaggcgtgtgccaccacggctggcctaattttggtatttttagtagagatggggtttcaccatgttggccaggctgatatcgaactcctggcctcaagtgatctaccccccttggcctcccaaagtgctgggattacaggtgtgaaccaccatgcccggcctcaaattgcttttacagaggcaagtggccaccgagtctgtgattgggatcctcctgtggagacctgtggagactcgtggctcactacctttgaaggcagtgttagggtaatctctccacatttccctgctgaaagctctgagtgttagtaaattccttctcatattagctaaaatgtattttcctgtgccttttattcactgatggggaatacaagcattctttttgagggtggccaatgctagtaattccctccatacagtcagtgatggatagagttaacccatggttgctgcatgtagtactgtcacttgctgtaccaccaggactcaagttgatgctcaacgcaacattcttttgcagggcccttgtcctcagtttcccttcttttggggtgggctgagagagacagcttattcagcatgaagctgtagtatctacagtttagcaaatgtctgcggagcctttaaagcagtttttatcataataaaaatattttaacttataaccccagaaagagataggcatgggagtctttatacagcacagaaatccagatgagcataatttgaaagtcatttgaattgtaatgagtatttttaatgtaaacaggcaggaggaaaaacttgctgggttctcttgtagcacagacacccagatatatgtcttttgatagtgatattaaagtgtcaagggtgcataggaggctgcagatgtcagcggcatgaatgggcaaggcaatttctgtggttgcaggctggaggttccagcaggaatagaaaggcaatctctgtgctagatggcccagggtcactgcaagtctagctcctaaatgaaaatcagggacaagatgtggcctgtaaccacagtcactgctcttcgtaaggctggtggaaaggtgaactggaaaggtttttagggttagggagatacaggaactcccaaacatcaggcacctgatagcactctccacctaacatctgcatttatattgacctaatgcatctgttcaatttgtctcattctttgtgctcacacacatttatttgaaacaaaactttccatcattactataggtgaaaatccttgatcacttgccttgaatacaagaaaccattattaaatgcaagctagataattttgcttgtcttacagccatgagccttaagtctgttccccccacccccccccccccccgccttttttttttgttaaaaagatgagcaaaatgtgagaatgatgcaaaagagatcctggtaccaaaagaagccttctaactggatatcatcagagggacagaaagaattaaagtatggacaaatttctcaaagtggtattactgttatttaattagttgtccatgtgctacctaaaacctttcaactacatcttttatgaagtatcccatatggacagagtcaaattccctcatttaacagatggaaagtttgagggccagagaggggaaggggccctgctgaggttccaacagctttctgatgccttgttccatgctttgccttatttctgctgtccacctcatcagctcttaagtgaatgttgtggtccctaattgtgggattgcagtgtgtccagtcagggcagcctcttcactttcctggaggaaaaggcagtgtgatctctcactgggtgatctctcactagggtgatctctctgcatagggcacccaggctggaaactagcagggagctggccagcacacccagcaggtgccaggctgcagggagctcctgcttcatctcaaacacaagaacactcagctcaaagcacaatattttctggcttagagtttggctcttagagtggcagctgttcctaccaaagcaaacattgaaaatctgtaattttcagaaataatcgccaaccctcaaaaaagatgtgtttacaccaaaactcctccgtgtgttcaccctgcattcactcagtgtcgagttgcagttttctctgcacttcatcgctctgcttcctcctgaacaattgcttttgccagggagcatcagcacagacaactagatcctgagcaatgaccagctgggctcctccccaaatggagccagataattttgtgttaccacttctgcatttttttcaaatcacatctatgcttaagcagagagcaaactctcaactccagcggccagcctatgggaagctataaaccttcattagttcagcttcaggtgtcttcatcagcctctcccgtaggtggccttgcaacctgatcttggtttcaaaattaaaaatgcagcttccttggccttctctggactcacagagcctacagttggagacttatgcactctacattttaaaatgggactcacaagcctgtgcacttgaggcccatgggtggatggcattgcctggctgggaaatgtcaatttcccaactgggcatccatccatccaccagccaagtggccagtggatctttgttgagcagttcctgtttgccgagccttgtgtagatctctgctgcgagggaggaggaggtccccaccttaaggagcttttaaggcttgttgggaaggcaaggcatatatctgaaaagccccattgcatgcaagttaactaacgatacaggatgatgccatgagacctctgccatccacgtaccagaacctgctctgctgatttcctggctcgatgtccatttgctgctggctcatgctcatattcacaagtcactcttgagagtcctttccctgtgccagaccccgtgctgagtttcagacacgcagggatggacagcacacagccttggccctccaggcgcttgcatccgactgtggagagccactcttagaaacccagggagcaatccaagtctgtgtgtgacgccactcctggacctggggaacacagagcccctgccagtgccctgggagctggtattcttgcagggttggagacagacctgtcttttgtggcctgttagtttccttgtggctgttgcaccaatgaccacaaacatggagacttaaaattacagacatttgtgctctcacagttctggagaccaggagactgaactcagcatcactgggcccacatcgaagtgtggcatggccctgcttcctcagggggctcccagggagaatccgttccttgcctcctctggcttctgctggctccggtgttcctgggcttgtggctgtatcactccagcttcagtgccagcaccttcaaatttctccgtgctgaattttcacatagacttgccctctgtctgtgtcaagcctccctctgccttcctcccttaaggtcacttgtcactgcgtttaggtcccaccaggataatctttgcatctcaagattctgttcttaatcacatcaacagagacccccttttcctcataaagcgacaaccacaggttccagtggctgggacctaatgtttcggggagcactgtgctgcctgtcacatgtggtttcctagatcatcaggcccaggctggccttttggatgtggccttaagtattcacgccacagaggctcattctcttgtccctgttctaccactttttagccaacttccccaggacacgtgtccttcctggtaaggaagcgcttggggtcacagatcagcctgcggctttgtggcctcctgggagacaggcccagcccggcccacctcctcctgtcgcctggaggtttctgagagctcatcgtcactttctcgtccctcagtgtgaatgcctaatcattcattgaaggcctgagttctgtgaacagaaagcaggttacgagtcagatccatggctggggtcagtgaggaaatacaaaggagattagggggacaaagaggggacagggcaggcagaactctggtaaggcaagcaggccaccctggcctcagccctcctggagcacggctctgctctgtgtgagacctgagaggggcacggggcccgtgtgcacctgtagctctccccactctgtattccgggggattcaggggattcgtaccacgcctgccagtggaagctctggtttttcgttttttttttgtttgtttgttttgtttttttgctttgttttgtttttaagagacaaggtctcactctgttgtccaggcatgatcaccactcactgcagcctctatctcctggactcaagcaatcctcaccttcagcctcccgaatcgctggaacacagatgcacaccatcacacccagctagtttttaaatttttttgtagaaatagggtctcactagattacccaggctggtctcaaactcctggccttaagcaatcttcttgccttggcctcccaaagtgctggtattacaggcatgagccacctggccaaaattctactttcaaaacaagcaaaccaaaggacctcatgctgaggccctgattctcactgaggcggttgcatcaatacaatgattctgatcctcacagcatctcaggggaggctccctgccctccagaggttggcctctgatggccatttcacagatgaagagactgaggatccgagagaataagcaacctaactgaggacacagaaagggagaaaaatggccaagtggccagggtgtggaagccaggcctggggattctctgccatgaaacattggctgtcatgactgagctcctagcctgtgaggacttgcatgtatgcacggcctggttgtgcatagaagggagagaaaggccggccgttagtctttctggacttctcaggctttggcctcctccgagaccctggggggctgccctttctgccttgtattcccccaaagtctctgcttcctaacaacagagtttgccttcttgcttaagacccagtgagcaggcttctgttcttgcagccaaaggagctttggtcccagcagtggtggtggctggggcagcgcagcctcctgcatgggcttggtggagtcccggggcccctgtgtgcaaggtccatgctcctccagctcccagaggcccagcaggggccagggctgggtcttgctgaccctgaggttaaagctaccactatcgctagggagagctctctgtgggctttcacaccccagaagtcccaggatacaagtctcctgaggagggcctctgggagagtcctgctggggacatggatccctgtgcggggggtattttatagatatgcaggatgctgaagtttcaatccaagccttttcacttcatcgccaaccaccctgctctctttagtaccagcaacatcatcaagtcaccgcagagaagcaagtacccctgggcagccttgacccccacccagagagactcaccaggttacagaggctggaatctgatggggtgatggttgttggttggggtttctcaggtttaaggagaggattttccctacccataccccccaccccattgccattctcaagaactcatcccagttgcccggaagaacatcccaggctgagttatgttgtgtgaccttctcaccagtctttgcagattagaagtagggtggacatctgagccaagccatgccagtgttctgtttgtggaggatttggagttaaggcggggaggccctgggagccagcctcctgtcttcaaggtgccagtgacttagaggccatgggtttcttccttttgtcctaaaaacatagagagggctgatgcagaggagaaccacaggagccgagggagaagagatgccaccttggggctcctcgtgttcccaggtacaggctgtacgtctggaaggcagggccctccttcctgccttgggtttccccaaaagtctctgcctcctaacaaggtttacttccttccttaagaaccaatgagcaggcctctgttcctagctgccaaagggcatctggccacagcagcaggagctgtgcagccccatgcgtgggcttggaggcctcacacagcttctgcatggagggcgaggggctcctccagctccctgaggcccagcagggcctggggctgggtcttgctgaccctgagggtaaagtcaccccagtcatgaggggaagggctctgtgggcttcctgaaggacatacgctttggaggtagagcagggtggcctatggggagagggaaggaacagggccacaagttgtcccagaacatttggctgttagagggagtgtatcagggcaggaagggagatggccctggcgccggcagctctggttagcttcctctgcatgtcacatgtccacatctccagagttcctgcaaggacaacaacagtgccatttaagtgaggaacctgaggtttagaggacatatttccttcccagggctgccgtcagagaacagtaactggttgggggagaggtgggggcttaagacaagagacatttattctcccactattctggaggccagaagcctgaaatcaaaatgtccacagggctctgcgccctccaaaggccctaggaagaggccttccttaccttttctggtggctccaggtgttcctgggcttgtggctgcctcgctccagtctctgcctgtgtattcatgtcgtctttcctcttatctcttggtcttctcttccatctcttaaaagagcgcttgtccttggatttgggcccacctggataatccagcatgatctcatctctagatccttaacttaattccgtctacagagaccccttttccaaataaggacacattcacagatgctgagggtggcaggtggacatgctattttggggcctcatttaactttctgcagataggctggctgattttccactgtcacgcagcagtaaatatctgagcgaggtctggaaccagcccagtctgactgccatgatatttgctggatacaacatgaagatatgggaggagagggagaaaggccagggcagaaagtgcctcccaacactttcagtatttcctgcactctctgggaaaacataggtatgatgatatttattctagatcaatggctgttagagaaaagccagggtgggaggccctgggacggccttcactcctgggtccctgtgctcccacatatgttcctacatgaaccatggcctccctctcagaagatgccctcagatcccatgggtgcattgctagcaacatccacaggcaccgggatcttgagcactggagcggccccaaaggggaaggtgttggttggtccaggaggagagcactctccagggaggtgaagggccagaagcagaatggagcagaattccttctactcaggctgggctgcaaggagaggcactgcccagggaggccgatagtgaaacctggtgctacctggcagtcagtctgcaaaagggaggaggctgtggagaaccctgtccccctacctacatttctgtcaccccagaattgttcatgcagtgctttgacactgccagcacctctgacctctgaccctctgtagaatccaaatgcggaactttatcagggatccatgcccacccccagcacacacacacacacacacaacacacacacacacacacacacacgtttttgtgggatgagtctgagaggaccctccagggctgtccacgtttcccactccagccctccttcctttaccttcacacttggcctcccgacttactctcaacccacctccttggtgtgcaaactaacaaaatgcacttttctgcccaaactcccctacatcattaagtgacatagaaagttcagttcaatacgggggaaaattgaatttatcttggaaatgttttattcttccaaaatttcactttggcaaagtctaatgcatagaaaagcatgaaatactacagctccagaccaagcaagttgttccactaagcattaagccgcagggtccgaattctgcctctctcccgtcaaccactctctttaactcaaatgcccatcaacgtcccggctaaatgtgagttttccacggatcgcatcttatcataatgtcacaaaacccatagaattacaaatcaggtttaaggcagaaaacatgacaggcaaatataagtacacaaaaagtacattaaggatccatcttcatttattctccgcattccaacctacctctccgcgcagacccgctccgtgcggcgctcagcttgaagtagcctcagatccattttaaagtggactgaaatataaatgacagttcacactgcacatgaacatagacaactgtataaaatatttaaataaagacaagaaagaacagaggattgcagcaaagcctttggcagaaccggccttggggaatttagcagcttgagattcattacaaatatcatctttaatgttatttttagttcaatattttgtagcactcagaagtaaatcttggtgcgctgtctcctctcccctgcctttctctccttgggtgtctgatccttcagttgtactgaaacctaatacgttttcaataaaattgatttgtgacgtcgtaatgctgtttgtttaccatctcccattccttgttgtaatgggagagaactattgcatcatttggcaaagtgaggaggattgctcttgattgctgaataaattgacatgaacctggaaacaaccctgttgcaatgtgaaaatgctccattgagccttccctccctcctgcactctcccattttgaagttctcgcctggtattccagtcctgagtgctaagggatcatctgtcctcccgaaagagagccattgtcccaaatatggatgcagaagagagagaaaacttggttttaaataattgctctttggtttctttctcagtgtgactcttcatctctagctagtttgccacctcaggaggaaattctaaaaaatggcatttgtccccaggtgaggggtaggagaggaccagttgactagaagccctgttctggggtcattttgcaaattcttcagtcttccaggggaactgcagggagagttaaacaaagctctgtccaggaggcagctggcaagatggaaaggaaggcagaaaacattgccttgctgctcggccagctcctggggtgtatgagtggaagcccttgaggaaaggacagaccctagtggtttttgacagagcagagctggggtttcacgtttgtcactccagggcaggctttgactcctggcccagggaagtgaggggctggggagagaggctcagacgggagctcagagcagcctgggaaagggatttttcaacccagatattaatgggcccatgatgtttcctagatggagccctcaagggcaagccaccctctctgtgacttggtttcttcacatcaaaaatgagtctgatgccctttgcccttgactttagtaggatttctgaggaagaaggaaaaaaaaattctcttttagtattgaagttatgtttacatatgtaaaagcaaagggagagaactcaggtggtgatttgggtaatttataactaaataaagcctaatagtgttttgtttatttattcgtttgatttttagagacagagtctcactctgttgcccaggctggagtgcagtggtgcattcatggctcactgcagcctccatgtctctgggctcaagcaatcctcccgcctcagcctcctaggtagctgggactataggcatgcaccacagtgcccagctaatttttatatttttctgtagagacagggtctcattacattgcttaggctggtctcaaacttctggtctcaaacaaccctcctgtgcctcccaaagcactgggattataggcgtgagccagtgcacttggccaagcctaatcattttaaaaacaaagatagttagatatttcaactatggaacaaaaaaatacccaacggttgttgtagttagatttttgttgttttgtttcttatttatcaagagaactacttcaccagatattgtgttgatgtggcccaaggttaacaggaaaaatcagaaggactcaggtatctgagaacatgagtaccccacgcagccaggatgctgccagtctaggaaactgaggtgctggccaggggagagccaggcttatagaattcagaaccggttctgggtggcctttggaatgtattgtgatatggtttggctgtgtccccacccaaatctcatcttgaatcttagctcccacaattcccatgtgttgtgggagggacccagggagaggtaatttcatcatgggggccggtctttcccatgctattctcatgatagtgaataagtctcacgagatctgatggttttatcaggggtttccacttttgctttttcctcattttctcttgccactaccatgtgagaaatgccttttgcctcccgccatgattctgaggcctccccagccatgtggaactgtaagtccaattaaacctctttttcttcccagtctcaggtatatctttatcagcagcatgaaaacagactaaacaataaattggtaccagtatattggggtgttgctgaaaagatacccaaaaatgtggaaatgggtaacaggcagagactggaacagtttgaagggctgagaagaagacaagaaaatgtgggaaagtttggaacttcctagagacttgttgaatggctttgcccaaaatgctgatatggacaataaaatccaggctgaggtggtctcagctggagatgaggaacttgttgggaactggatcaagggtgactcttgatatgttttcacaaagagactggtgacattttgcccctgccctagagatttgtgacactttgaattaagagaaatgatttagggtttttgccaaagtaatgactattacttttgcaccaacctaatagcagaagtcaggtgcatggactgcagcctgctaaaggctatctggttggcacaccatcagctacaggcagcaggactttgcaagtgaaatctctttctaccatttctctaccaatcttcaatctgcattctggaccgcaaagacaagaaagctcactgtgccacagtccgttttgagcatatcagaggataagcatgctacataataatgggtcaggcagaaggaaaagctgacttcttgcagctcacatcgtaggagaggaaagggtcaagttcagagcagcagaggcactgtttttgccttttttcccgtgacatgacaccattccacttaagtagctgctgtcagattcaatgagaaaatacgtgtaaagcattttacacactgtctggcacatactaaccactcaataaatgttagcttgttattattatcattttcctaaatggagaggtcaaaccaattagctgagattttctttttaatgaaaactctgatgagttaatcattgtgaggtagggaggctttgaaacccctgttaactgggatgattaaaacatacttgattaagctgaggcagtgacagcatatagattttcttacaggccaactccaaccgagtcatggtggtggccactattgttaagaagggttctgaggctgaacaaggcttaggacgagggagttttcagatgaattagtcacatgtgccttgcacaccagagatatgtgggcaggggtgatacatgacattcctgtcctttggaataatcagaattcatggcttttattaatcatagagcttcaagaaaacagattagaaaggctgcttagctccataagctgcaaatgttagaacagaggtaagatgagaaagaagtttccagaatgtgccaaaggtaaatatgcttcttcaacgttgtctggattttcccaagaagaaaaaggaggagaatggtgatgagaagaagatggagaaggagaaaatcctttaagatatgacttacagaggcattataaactgaaaggatcagcgtctagaatgtgtgcgtgtgtgcgtgaacacagaaaaccataaacaaataagaaaaagacaaacacctaatagaaagacaggtcaaggctaagacttcttagagaaaagccaatgatcaataaataaaagctgctcgatttcaccagtggtccatgctgtgtgaactaaaacagcattctatggctccaaattggcaaaacttttgaatctgacagtataaaggattgggaggatgtgagaactgggtaggggtgcacacaactcacaagcccttaggacagcaagttggcaacctctagcacagctataaacgtgccaatcttctgctgttccagcatttccacactaggtgtgtactctcagaaaacgacagtcaatgagtcccatggaaggatgcttcccatagtatggtgcagtaaacatcaaaagccaaaactagccagacagccccacaacagggaaatggtgcatagcgaccagacacaagatgtatggtttacctctgagtaatagagaagtgtccacgtcatgtttatgtagagaacaagtatggcacggaggacagtccctcgtcttctaccaatgccgtacgttttccatctaaatacaaagaacatgtcctgaaggccacacacccacagataattatgataatacagaatatatggcggattgggatgggagagggtcagagaggactttactcttatctgtaatgttttaatattttataacaataatgtgttcatgtattctttgagtaattaaaagttaatggctcatgcctataatcccagcactttgggaggccaaggtgggcagatcacttgaggtcaggagtttgagatcagcctgatcaacacggtgaaaccccgtctctactaaaaatacaaaaattagccgggcatgcctgtaatcccagctattagggaggctgaggcaggagaatcacttgaacccgggaggcagaggttgcagtgggccaagagcacgccactgtactccagcctgggtaacagagcaaggttctgtctcaaaaaaaaaaaaaaaagttaatttaaaaagagcctcgactcctggatttacagagcacaggcaggcggctgggggtggtcagctggatgcacgtggcgatggcaatgtctctgcgtccacagcagcctctggcccttttccttggctgttactggccatgttcatgactgagctcctttgaaatgtgttcactggggaagagcagtctcctgtttcctgttgctactgcttgaaatcatgatttcagagcccaggctgtaggatgggcagctgcctcttccctaggtgggaacagaatactggcccagcctcttgaagtctccttgcaggttcctaccctcttggtactttagaggggaccctgagaagcagaagacatctttttattcctggaagcccctgctctccttgtccatggtgctggagggtgaatatctccaaatcagcacctccatggcaccacgtgtgggtgaccaacaactgctcacaaaggtttcttccccaacctctgggggaactccaggcagggagacctgtggaaatacctcagaggatattcctgtaatatggactgcttggacctcttagaccctccccacttgctcttgcattcaccaacccagcctcctcacggccagccagtcctcttcctggcctctcttccaggcccagctctgtgccagcgcctgggggaggctccattctcttaccctcctgcatgctttgttttactcccactggccaggagccttctggacctccttgagaagcagtctcaggccagctcaggctggggttggggagatgggctatggttgtttcctgatatgatttggaacttttgttctctccaaatcttatgtaaagaagtggcctcccatgttggaagtggggcctaccgggaggtgtctgagtcatgggggcagaaccctgatgggtgtctgggtgccatcctcaccataatgagggagttctcactccgagttcacaggggagcttgtttgaaagagcctggtacctcctcccctctctcttgttcccactctcgccatgagacacactggctcccctccctactctgccatgattggaagcttcccgaggtgtctccagaagccaatgtcagccccatgcaggttctgtacagcctgctgaaccgtgagccaagtaagcctcttctctttataaattacccagtctcaggcattcctttatagcgatgcaaacagatgaacacgtttcccctattctttttgactttctatgaccttcccggtgtccaccgccccttgtctaaacctatgctgtcgttacctgtgcggtgctgagtccccaatcaggccttctcatcaccagcaaccagcattgcctcttgaacccatctttccctgcacagcagcctggaggcactgcttccagggagaagtgctaaacacagagtgcccttgttattgttgttaatggtgaaatactcactgagggcctgggatagaggaggatcaagaccaactccggtatgcacatctttacctgctgtgctgctcagcaccttagggccaggaagggaactcagaggtgggtctggtccacagagccagggtgcttgggctgcagccttgcacagatgagactgctctctggttcaggaagcaccagcagctccgagtcaggtcgtctgggttcagttctgggcttggccacttagaatctggtgctgacagagtggctgtccctcatagctgaggctgaactctggtctgtttcgtcttgtgtgtggggcatataattattcctttcttacctgtctcctggctggagggtgaagttgtcatgcacgagaaagggcatttggaaggcccatgtttacaaggtcccttggtcctgggcagggacgttcttctgtagccttcgatccaggctcattcatcagtcacctgattggcacagatttattgagaacccatttgccaagtattcttctagactggaggaatgcagagaaaagcacagtccagccctcctgttattttcagtctagcaggaggggagggaaatagaaatggaagtgcacagagtggcaggtgctattaggggctgaaacaaaaggtgctctgggcacaccgtaggtcatgcggcccggggagatccccctcagctgacttcatctatgtcagagtgaacagcatggacgaaagcaccgaagtgtgagggagtatggtgccttcttcttcaaaaaggcacatttcagagtggctgatgtttgctaagggaatgaagttcaaggacaagctgtgcaggggagcaaatacaatttgaggcagttgatgccatccacatctccacagcactcacagggctcatctgtggaccaatttctactgcaagttcctccaaccctgcaggacaggcagctcagaagtgctagggagttaacatccccaggagcatccatcccgcattgggtgggaccgctctgtgtcccattctgcactgcatccccaggggtctcagcagatctgagctccagttacccctagcagcaagctgctcacaaacccatctggctttcttctcttccctgtctcacttccttgctcccccatggacatttgctgccattgccccccaaataaactactcaaagaagccagtgcctgcgagcccaaatctgaaacaagccagactgtgaaaaacctggttttgcctcaatactcactctgtatgagatccaatgggctgtcccattcagaagaagtttctgcatttctgtctgtttctgctgttcctgctacccagtcaacagagcacatgtcagcctccttccagccctgggacagccctgcccctcccttaccttgtcccagtctccccatcacacccacaccccttgtttaccaaatgttcgatcttggttatgttactataaaaatcaagcagctggcaattccagcttgattaccaggtctccagttttgattagtaaattactgtggtaatcaaggttaattctcgctgcagcgctcagcaatggattttatatttttcagggaaatggttttcctgcctgggatggagaacatttcattaaaggaacccaaagataggaaagaaaggaagtgagtcctggaagtatggagaatgggcacctgcaggtctcctctctctgtcctaccttccagtcggcccttggctggggtcaaggagccaggacaggacagggcctcctgagaaatactagtccaccacttctggcttttggagtgccattgagagaccagggaaaaactcttcttgctggaactgaaagccactgagctcaggtcagaaatcctagctgctggggggtaaaggggtcagtgctcaagatcagagatgtctttgggtgattgatatctttaagtgcttcagggggatgtgaaggaaagtaggctctgtcagtgcttgtgtgcgggcagcctctagactctagactccccgccctacgggatgtcactttctccagggaatgaatggcatctatggaaggggtcaggagttcggagagacacccaggcttgcaagagagctcttgggatggtggaaccttgcagctggatttcatttctgatttttgtcctgggtctagtatatggactgtggaccccagacaagttggaattaaggtgttctgacctacagatagagataggacaagagagaatgggggctggccccagcccacccaggatttctctgtgagctaatcccaccacctgtaactccctatattgccatcaataaatgtcagcaatgaatgctttgcctctagaaggtgagatttgtttttagtatctctttgggggatggacactgtcagtccatagaatttatatcaaacttttttagcagcaaagatgtgtggcagtgaaggttatggtcagtgcagaggtgctcccacctcatcccactctgagtcaaaggaagctcacaggttgctctgctgccaaccccaccctctatctgtccttctctcctacacatccataatcgccctctggaccagagcacgcagctggtcctaacttcacctggatgtaaagatgaagcgagtcgtcctgcaggctccacccttcactctgctccatacagtaggaactggtgtgcacatggtgtagactctgttctggggagtctcaccccagaaccgccaagcaggaagaacagatgattaaaacccagacctggcctttgacttggtcatcttgttttctgggggtctcaggaagagactgccttcttggtgtctccccttcccagattactgtctccaatttcaggagtccccaaagcttattagcacctttacaaagtgggtgtgggtgaggtggagtctggactgggaagacctggagctagcactcctgtctggaggtgagattgatatgtcctcattctcagtgcccctgtggggccatgcctctaggaacagatgtttgctcaggggaaggacaacatgtgtccaaacctcatttcaaatatgttttgtgctgggtatggtggctcatacctgtaatctcagtactttgggagtccgaggctggtggactgcctgaggtcaggagttcgagactagtctggccaacatggtgaaaccccgtttctactaaaaatacaaaaaattagcaggatgtggtgggcgcatgcctgtaatcccagatacttaggaggctgaggcatgagaatcgcttgaacctgggaggtggaggttgcagttagccgagattgtgccattgtactccagcctgggtgacaaaagtgaaactccatctctttctctttctctctctctctctctatacatatatatatatatgcacatatgtatatacacacacacatatatatgtgttttgttaggcagaaagtgaaaagcctttttcctccccactgcaaaatctgggtgtcccgagacccctcagaattctcggacaggatcttggatcttcatctctgtgcctttggcagccacgaaaccccacccatccttcaagtttccttacaacaaaattatgctgtgctcttctggagtggcatgaataaagccccatgaaagcagagagtcccaagaaagggcctaattccaggaagagatggaaactcttgcaggtccccttgcttaagaacaattaagccctgacacgtgcttgggtggcagggtcaggagaattgtctgagggccactgcggcttatgacaggggctgccagtttccttctaactctgagaagcatgtgagctggacttaaactccatccagcattgtctacatctccctcacccttgctagctttatgaccttgggcaaggcacttccttccttgtacctcagcttcctcctctgtcaaatgggtattatagcagtgattaattcacaggactatgttaggataaatgaggtaagacatacaaaaggctttcaccttttataagaaatagtgcttaaatgtggcccatcaatatttcttaccccagcagggcagtattatgcaaatctgtgcttgcatgatgtgatgtttgctgatgagctggtagccaaagccagcccagggtcaatgtgggagagcaaggacagcgggaggtctgactccctgaatccaggtgtgctatgaattccctttgtcagcaattactacaatgtctgagtctccggatgttcttgcatccttgtgcctcacccccttgtgtccagtggattctttttcatccctctttcccgtacgttttgtcttgaactacacaatgtcagtgggatgaggtgcaggagaaagagagtggtcttaagagagaagatatctttggggtagatgaagaatccataaactgcaagactactttatgggccgctagagatgaggaaaaagtagtcataccgaaatgtgttttgggaggctaaattttacacatttgtttggtattatgcaaattttcctttgtagattactctcagcagagaaaagcaccatgatgtcagtgccacgttaaagtggttagtgtatcaccctgcagcaagactgtggaatcagaaccccagaacaatgacttctggcattgtctctctattagtgattgcagctgatgtcattttgccaaacaaaattataagcaaaatggatgttttgggtcagagtgtgccaaggaatataaagctgcatttctttcaataaatcctgccctcttctgccaggacaaagacatacaacctatggtgattgacgttttcaccactaaattatactatgtctatttctagaagaaatgtctccattccaaaattagcaaaccatcaacataacataaaataacatgaacatggtgtcatttcgcaaagatattgattcatgtagactcactggattaataactggtttcccataaaaggagtagtcactatgtctttggtagacagaaaaaatatacactttagaacaatatatattggtacctttaagcctgattgctaagctcaaataaacagaagagttttcagaggaaacattgcaaacgaagagagaggtgacatacggcaatgtacaaatggatccaggagtgatggaaagctaataaaaaaagacaactatttatttatttggagcatttgattttactctattggattacatgaagctctaatttttcactgcagtcaatctgtataaaagttcaactgattgaagcatatatttaattcctaaatgccttttctttcaaccccctacttcttcaaagttggacctttagtgtcttgagtagcaaagaggtttggcttatgttggagcaaccagacccaaggaggcatttaaatgctgtgggtgatttactcagttcctaacgacagccaatccactcttttctcctctaggactggatttgccaatatattgagaaaatatgtttctttgcattttttttgatgttttcttcaatgaagttccatggtaataaagtaattgaaattaaccttcccagtttactcatggcatttagaatgaaattcaaactccttaccagagactgttggttccacatgtgttggttcagcttgcttttctaagctcacctctctctactcttcttgccacacccagggttggccctttccgtcaaaggaacagtgctcatcactgcccctctatttggaatcttcttccagcctttcacattgctgcaaccatcttgtcttttggcctttgctcctcaaagacaccttccttatccatataattttctagaaaaatgaccaactgtccatgacccactttcattgaattattgcattttaatatcatcgtctcttccctctggaatataaaccctttgagaaagggagagtccttatggggcttgttgatggctgtatccctgtggccccgcacagtgttggcagacagaaggtgctcaataactgaatggatacacttctgggaggaagattcagaaacagaaagcaatctttttgactcagttccaatttgctgtcatgtttttgtaggataattgtcttctttatatctcaatttttcttcccttaaataagaagagtggtgtttatatgctgtccagaaatggtgcacagattaagtccattgtaaaacaaaacaaaataaagctatctagttatttatttgcttttaaaaaacttttctggtttcttcacaataggcttaagaggtaagagtttgtttaacatagaaaaccaactatgactgtgaggacacatctgctctagggattaaagctaactcagtatgtaaaacatccctttggaaatggtcatatgtgtcttcaggggatttgacaactggttctcccatttgtttttcattgttgaaacagatcattgtttctgcagttgaatactggattaagtagttgtattaaaaattaacattttaatgcactaaaatcacagaccacgagacgaccacccaaggagacacagaggaaatgggacccagaagagactgcatattcattggttcccattttatgtttatttctggacaaaagctgattgagtaagctggcaggtagactagcctacttcttcaaccattgtgtttccatgcctggcctccaccctcttcaactgggaatagattattttcattaacccaacagtagtgattccccctgcagcttcagtctccagttatttgtagctgaatctattgcttctctggaaaggattgcagatagccaatggccttccaatgctctgggtggatttgctggctgtagtcccatctggaggcaatggaggggagtgcttccttggatatctttctccaggtgaaaccatttggcaaggtctcagaactctaggaacagtctggaagcccctttttttgccaatgttgggaatgtcttgcccatcacagggatttgtctgctttggaggttatcaaacctgaaattgaaggcagtggtccagcaggatttaaagtcttttctaattggcagaacctggaaataatattgtgaatctggaaccaaagggcccctattgccagtgcctttggattctagaaatgtgagctcaatagtacctattgaatagtccctaaatctctgtccttacctcgcaggtcagcagttctagaagaatctttctggacaaaagacctggagttggcacttttggctgccactcaacattgaatggcctctagctgtgacccatcttgggacaagaaaataaactgtaagtttggaaaatgaagacttttaaaaagattagactgggagcagtggcccgtccttataatcccagcactttgggaggtcaaggcaggaggatcaattgaggctaggggtttgagaccagcctgggcaacatagcaagacctcatctctacgaaaataggaagtattagccaggtgtggtggcgtgctcctgtggtcgcagctactagggaggctgaggtgggaggatcccttgagcccaagagtttggggctgcagtgagctgtaattgtgccactgtactccagcctgggtgacagagtgagaccctgtctctaaaaaaataataaaaaataaaaagattagatacctgctggacctcatttgcaactggtaaaatcagaagctgtcttccagcaggtgtttatatgagaataaaataagagagaggaggagctgccccagaaggagaagtccccaggaggggactctcagccagtcacactctgcagcccagtggactgtttcaggaacctcctctccaattcttccacccttgcctgctttttggttcccaacccccactcccacagtgattttgtaattttcattccatccttcctgaagataaaagacaccatgggtgggatccgtgaataaaagtcgttatttatcgatgccggttttggggaacatttttccttctgattcatgaaccacttttctacattcgaaaagcagttcataaatcgttcagcaccggcagaaattaataataatgaatccatttacataaaatagtctcatcctgccaggtgctgataatatttgaagctggaatctctttaggaaactggatggcatatgtgcgtgtgttttcctatacatcagacctcacaccttccttttgtgagttttaccagaaatttaattatttagtggccagtcttgatcactgggagatgctatttgcaaaactggggaaagataaaaataagagaaatattgcagtgtcttaagaagatagttttaagccatgagagttcgtgtctagtgaaattaaccctttgagtagttcagagaaatacagctacccacggaatcattgagtcctaagaaggatcgtcactatcttatggctcacatatgctcacactcacacaagcatgaacacacacaggatttttttgcagtaacaaaaatgaatgcatacatcgtaaactctattttcaaaggtatatgacaaagagcataaattatattataagtaggtcttatgtaaaaaaaaaaaaaaagagtactgtgatcagacgaactggtgcaacataccaattaacacaaacaagatagggtgcctgcctccagagtagcacactccacaaatggactgaagagtttggcagaaatgttttgcttgagtactttttttccccagcaggaacagaaggttaagctctcatactcctcagtcattagaatctgattaccactgtttgttacatggtccctttcttgttttgtatattgatcccactttatcctctcatgctactcctattcctataggaaaacatgcggttgtgttaaatgtacatttttgttttgtttgcatccatttttaacttacgtaaaggatattatgttatttacttggttctgtatctttcttgtttcatgaaacacagtgactttcacatgtacccacattgttctgcaaacatgaaatctgccgcttcaccatgatttcacacacgcttatgttgttgctctctaaatgtaaaatctgctgcttctggttgtacacagttctctctaatgtccatccattcttccagttggctgtctccaattctccatccctacagacaatgctgcagaaagagtcttttcaaacaggtgcaaggatttctttgggatatatgtccatgagcagaattgcagggtcactgcatgtgcatatattaaatttgactaggttgtgccagatgctcctgggtggctggcagctccagtctacattcccaccagcagtgtggggagtccatatccttgccaacatgtggcattatccaactgtcttgtcaatccgaaaagaatgaagcgctgtctcgttttaatggcatttgtttctaattgctaataaatgtgaacatctctatatgtgcttattaattagccttttgaatctctgctctaaatggcctatttacagcctttgtacatctctttccttctgaaattgtttgacaacttcttattgatttataggcattctttatcagtttttgacatcataaacttctccaaatctgtcactgcctataaactgtctatagtgtcttcagttgagtagaagttctcctttttcctctatagttgtacagtcctgtggtaggcagacttccaaggtgccacccagtgatctctgtctcctggtactcacgtggttgtgaatcccttcatatcaagtgtaggctgagcctagtgacttgcttttcatggatggggtatagcaaagatgatggcaggccactccatgattagattacaaatgagtgtgacttacagcttgctagtagactctattgcccttccagcttgcacactttgacaaagacggctaccatattggacaggtccatgagacaagaaactgagaaaggccaatagccattgagaaacggaagcccttagtccaacagcctgtagagaactgatttttgctgcaatcacatgagcctggaagtggatctttccccacttgagccttgagatgactgaagctccggccaatacgtcaattgcagcctggaagagaaaccccaaaggaccctgctaagccacactggattcctgacccatggagataaagaggcacattgttgtaagccattcagtgttgggttattttgtcactcagcaacagatgactcatagcaattctaaagttgtaattttgacacttaagcctttagtttatccagatttcactcctctgtagtgttaggaagagatccagcttaatttttcaacagaattggtcttgaattccaaacctgctatttacattctgtttcacaaggtgagataatgtatgaaaaattgcttaaggcagtgtcttcctcccacaaagaaaaggcagctacagatgcagttatttgctattatgcaactcagtgagaggccattgtagaggatattctccaaaactccctgacaatgagtcacttcctgattgataatttcacatagctgcattcttaggagctcacttgggaacctaaaccatggagaagttaagattttgtcccagaagtctcctctgagacataggtcctctgagacacaggctactttaaggaaaagataaaaaatcacctgggttctgttcctgactactgctgactagctgtgctgtatggagtgggttcactttcctttccttttctttctttcttttttttttcttttgagcctgtcacccaggctggagtgcagtggtgggatcttggttcactgcaacctctgtctcctagattcaagccattctcttgcctcagcctcccaagtagctgggattacaggtgcgtgacaccacatctggctaatttttgtatttttagtaaagatggagtttcactatgttggccaggatggtcttgaattcctgacctcaagtgatccacccacctcagcctcccaaaatgctgggattacaggccactttccttttctgtcttagtttccccatcctttgaatgaagaaggcaaatagggtgatttcactttcattccatccaccactctgttccctgagaagcagcaggaaggccttggagaatgaggattttcactctagagctgcagaaaagcaggttggaattcaccttgtgagactgaccttgggtagaatcaggtcagggcctgattgctctgtccttcctctgccatgtcctgcttggtgctcagtatccccccttctacatgggacctccagctgccctagttgagtcagctctgttaaaatagcttacaggccaggtgcgttggctcatgactgtaatcctagcactttgggaggccaaggcaggcaaatcacttgaggtcaggagtttgagatgagcagggccaacatggcaaaatccggtctctactaaatatacaaaaattagccaggcatggtggcatgcacctgtaatcccagctacttgggaggctgaggcaggagaatggcttgagcctgggaggcggaggttgcagtaagtggagatcgtgccactgcactccagcctgggtgacagagtgagactctgtctcaaaacaaacaaacaaacaaacaaacaaaaatagcttacatatcacacaatggtctctttcctcttataacagccacaatacatttggccataaatttttgtctctaattttcaagtctgtgtctgctgggggagagatgaagtgtgtgcaattctgaatcactttaatgctactcaaagaaataccactcagtcagtcttttggagtcattcctcctatagaacaagccccagtgctcacctgattggtagagacagataaaggagacacccacacaccaaggtctttttggatgagtttgaaactttgcaaaacacctggcagaatcgtaagttctagtctgagcagctcacaatacgtatgaaaggccatcagagaatgtgtgcttttgagacaggttctcagaaaacctgtgggaagcatggctaaagtggtgtgaacataccctgtagttaccaccacctgggacttccacattgaacaggaccactggtggatctggttagagagagagagaatgtgacagactgatgtggcatctgatagctcctgcttcccgtggaagatctcttcagttgtcacaaaggatccgcaagctccagtgaaaaaccaacagctacagaccctgttgagcccatgggggctgcagagcactgtgcttgctgaactctgccactgagctccatgcactgtctcaagtaatcctcaaaactgccacgtgaagtaggtgctcttgtttcccccattgcacaggtgagtcatcagaggtgcattctagggtcaatcagaggggtgagacaacagcaacgataaaccaattcatcttcaattaaggacaccatggacaaaaatatgactgactgggaaaagacattggcaatgtctttgactaccaagggattgtatttaggtaatatcaagaacatcagccaacaaagagccaagaaataacccaaatagaaaagagacaaagtgcatgaaataaaagaagaaattcaaaatgttcactaaaaaataaagagatgctcaaatccacaaataatgagacattaaattaaattaaaacaatgaggaagtaggccgggcctggtgctcacgcctgtaatcccagcactttgggaggccgaagtgggtggatcacctgaggtcaggagttcaagaccagcctcaatatggagaaaccccatctctactaaaaatacaaaattagccaggcctggtggtgcatgcctgtaatcccagctactcgggaggctgaggcaggagaattgcttgaacccaggaagcagaggttgcagtgagccaaaattggaccattgcactccagcctgggcaacaagggcaaaactcctcaaaaaaaaaatgtggaggtaccctatctgtatcattagattggcaaaatatgaggcatgtggatggtgctgttacaagaaaggggtccagatccagacaccaagagggggttcttggatctcacacaagaaagaattcagggtgagtccatagagcaaagtgaaagcaagtttattcagaaagtagaggaataaaacaatggctactccatagacagaacagccccaagggtagctggttgcccatttttatagttatttattgacattacactaaataagggatggattgttcatgcctcccctttttagaccatagagggtaacttcctgcattgccatggcatttgtaaactgtcatggcgctggtgggagtgtagcagtgaggacaaccagaggtcactctccttgccattttggtttcggtgggttttagccagcttctttactgcaacctgttttatcagcaaggtctttataacctgtattttgtgctgacctcctgtctcattctgtgacttagaatgccttaaccatctgggaatgcagcccagtaggtctcagcctcattttgcccagcttttattcaagatggaattactcttattccaatgtctttgacagtgctaagctttaataggttgttggggttctaggagctcccacacggagtcagtgggagtatagactgatgtaggtatctggagaacaatctggcagaggggagtcaacatgagaatctgcatccccggagcaggcaattttgttccttagtacacattcccaagaaattctcacactgctccacatagggccctgagctagggtattcacagcagccttgcctatggtggtacagaattgaagcagcctggatgcccatctctggggcagggatggaggactgtcatctggcagatgccaaccttggggggatcatccagccatcagaagtcacagactatgtgaacccatgacaacaggcacggatgtgaaggcacagtgctcagcaaagacagcgggaaacagaataagatgatgaatgcactcccattgacacaaattatccaaaatgtttgacagtctgtattacacaagtggaatgggagccagttcctggaatattgaccctttcattggtgggctgtaggagattcaataatagagctgggctggcctgagtgttgaacaaccaaccctctggggacatggggaaggggcattttgccaaccaagatgacaatattttcaatattttaaccatagatctggctgcactggtgcattttggctgaatatcaaccctaggtggaagccctgagcacaacacccttggtcagaacggtaacaggacactctcctgttcatggtagggggagaaatccgacagtggggtaagagtccaggtcctgtgggagtccaaacttgcagggcatagacaggagtgatgagctggatgacacttgtgaacatggcataaggggcttttcaaaaaaaggcctcaacccaaagagtaactcaggatagaaattcagacactttgaagactccaggagctgaaattatttgtgtttagggaaaggcctctccaacttgtccaagtgacaacagcatatgtccacccacctactgctctccatgtaggtccaccgtggttagagcaagtctgacaccacccacgaagtctggatgggagtgacagattcctcctgttcaaccacaccacccccaaagggattgccccccgcagatgttttctgtaacctgctctgtaggcaggtgccaggtatggatttgtgagttggggtagctgtgatttggagacacaggccattggtgttgagtttgagacctagtcaagctgtggtctcaggagttccaagaaagtggataggaggttggacatcttttgtggctggggaggaagcccctgtgtgagtactcagatcggatgccgagacgcatctgtttgtgctcattctgtgatgacagggacacattgatcctatgcttcgctagctcacaaggggctgggagtaacaatcaagcagtgagtatgtaagacgaacacaccacaatccccatcattagggtgagtggagtctggatcatctgccctgtcagggaggcagcagactgctgggaaaaactgggtgcattccaaacacaatcagatcctgcaggcgttacgggccttctcaaatccacattggtccatgccaggatgctggaatgccaaggggccattaccccctggcccttctattccagtctgctgtgaacgctcctttggaaatggtagagaatttgcatttatcagaaaattgcttacttactctaatcatctatttgtaaggttttattttagctagataatgaataagactaaattgatgtcaggcatggagtaattttaaccaataccttcagaagtctgtaataccaaatattggaaaattatatgtagggtaatctaaataatgagatgttaaaatttcttggatcccaggaactcttcaattcattttttcctctctctctttcaacctcactgtgggaggcgccatctctgacatctttatatatgatgttctcatttcaaaatgccactgaaccttcaaatgaacacttgcgtatggtccttgaatacaaaaatacttaaatcaagatttttatattttggtgcagccagccagaatgcacagagagagatgggaagatttagctcagaagcctacccaggaaggcagaaaaggtccagctaagggaaggggagaggcaccgggctagcaaacagatacacgtggagatgctaaagatggaaggaagagtgtcttcctttggcctcctgtaacctggagcaaacacaaaatccaagttgcaaaggaaaattccttctcctgagactaaggacttcaaaagatgctccaaaaggaataaataccataaaatgtatactgtgtgcatcgcctgtggccagctcctgtgtctacagagaagaaagaggagatggtgcactgcaaggcaggtggagctcagtgagctcagcatgaagacctgggagctccctgaccattgcccacaagcttacttcactattctagtctcagagcaaatcgggtaaatagataatttgcatgagggttaaagaagagttaaggggatccaatgcctggatgagtccttgtccgctaagggcaaggaatggggctggtgcttgactgacgtgattgaacttgattataacagtgacagatacattggctagagtcacacctttttattttattcactttatctttatttttccagccttattgaggtgtaattgacaaatacaattatatatattcaaggtgcataacatgaggatatgatatatgaatatatcatgagacaatcaccacaactcacttagttaacacatccttcaccttgcatagttacctttttgtgtgtgtggtgaaagtatttaggatctactctcttagtaaatttcaagtatacaatgcattattcttagctgcagtgaacatggtgcatattcgatacccagaatttattcctcttatcattgatcaacatctctttccccttcctgccctcctcaaccctagcaataaaaattctactctctgcttctatgaattcaacttttttagcgtctacatgtaagtgagatcaggtagtatttgtctttgtctggcttatttcagttggacaattcaattagacattttgtaatgtcttccaggttcatccgtgtttttgcaaatggcagaatttcctcctgttttatggctgagtaatattccattctctctctctctctctgtgtgtttgtttggggtggggtgtcacattttctttattcattcacctgttggtgggcactagattggtttgatgtcttggccattgcaaatagcactgcatgtcataccttttcatagaggaggaaataaaagctcagtaggtgtaactaacttgccacaatcctatacacagggagtggccaagccagtgtgtgaaacctgatataactaggtctgaagcccacactctcaagggagttgccagggatcaagggaaaagctctagagtagagctatgtggctgagccacatatcccatcgatggagtagcctctgaatatttaatagtgactacactttgccaaaatgggtcaaatattttggaagtttaaagtttggagacaaaggtggaaaactttgtgtgtggagtaagaaacgttggtttattttggcactaagcccaccttggttttgttgggacagctctgcttctccctattattaggcagtggcctgccagccttacccaatactgcaaggaacccaaccagtgaggggagccgcagtcagggatttgggaagcgcagagtgcaggcaggtcccgtgggttggtaaagtcacaggaagagcagatttgatgcactttctgccttaagtgtccctttcctccattctctgtttctcttggttttgttttgtttttggaggagatactagaatactcatactcaaccttcaaaactcagctcgaataccaccgcccccaaataacctccccagattctaagaggtcagattaaaggctcccttagttcacaggcaccccatgcacttgctgttgtgtggcacggtgtgcttgtctgtctcccactgctaggcagcgagctttcagagcagagacacacatggctgttgcggaagaactggggacagatgaagcgcacgtgtgcatgaggctgtggtgcaggcaggggcagcaggctgcagcctggaccagccaccttgaggaagaagggcatccagactgctggtgacccatgcagccagtgcagagtgagagcccagcaaagtggcctttttgggaatctgatatggattggtacatgggggcaggggccatgttggccaaccagagggcagggtcgctcagtttgtgagtccttgcccggggctgtctgcatcaccagtctatcaggaagttccttcctgcaatagcagtgtttgagcggggattagggcctgaaaactgcaagtagtgacctcactccccaccccacattgatccattgactattgactagaaccaagactggaaaggtcttattcccttctcagatcctcccagtcctcagaaaagggtcagataaagtgcgaccaagacacagaggaagaagatggaaagggagagaaagacagagatggtagacaacaagacaattgtgatgcgaagggagagttccaggcaggagagggcagcattggagggagattcacctgagatccatgtaggaaaccaaactccagcccagcctctgctaccaagagggtcccacctcacccagttctgttctcccatgcatagaaaaatttaaaaatatattttactcttttctctgatactcaattcccctgaggaatattttttgttttgctttgttttgttattgttgttgttgttttttaagggaaaaatgttcacggaaggttataaaacacatataatttactcatggtaattgcccacatgttatttatgtgctgtgctggcagtgagaccgagaagaacgacttgatcaatgcattagtctaatcacggggttcctgctcttaatttcttttgctggtaatttccatactcaggcagcaatgcgtagaattatctcgatttacagatctcggggccctggggaaaatctctttggagccatttctgtctcctgggaaatttgaaatttattcaacactgagtttgaaagccctatgatatgggttcaacaactccaaataataccttagaaatttagtaggtctgtgtgacatttttccttttttaattagtaactttagggggctcagaaacggatcacagaacatttttaagaacaacttttggtcaacttgaagccaagatttggcagacttggcgtttgccgggaaacacacacaaagaaaaacactactctttcttttcttgttaaatccatgaaagttcctggcttggctttgccccgggtttgtaacacagtcttctaaggtggagtatttatggcaaatctattgaaagccatgggagaaatttcctgtaacttcaatttactttgacagaaggagacgcaacacctgctgttagctgaacctgctgaccaggctccgtctcctcaaagttttgggggagcagagaagatggtatgagcagaacttctttctcttggatcagctcctaggtttgttctagtgcctgaagagaacaggttgcagtatctccaactgcaaagcaggtgcgtggagccacattccttctgttgagcaaagcccttcagaggggcccacgggcaggtgagtcctcctcccttaacacaatatcacagacagtccagcctccaagcctcaaagggcagagcaaaagggccaaagaggagatggcaggcacagcctggactgtctgagatttcagatccgcagaggaaaagttggcaagcgtcgggaccaacattcttctaccattaacactcacctaggaataatatctatattttgggctggcacttcaggtttactgtctcgtataatctcaacaacctgggaggtagatgcattcatattcttattttgcagatgaggcaattgatcctccgacaggttgaggagcacctgcaaggtctcagacaggtggtaagtatcagaaagagagggtttaaatgcagattcggtctgattctgcaggagatctcatacctgaacaggtgagtcatcgtcacgtttcaggagcaaccaccagggcatgctgaacttcctaaggcagtagggtgaccagctgccttggtttgccggagactgggggtttcccaggacacaagacttgcaatgctaaaactgggaaagttctggacagactgggacaagctggttcccttatctggaagtgagaataaaacataagctactaagagtgctgtgactttaaactgtaaaatcaaaataagtagcaaaccagtggtttgtgggtaggatgtgagtctctggcgagtttctttttaactgcatggagttcctaaggcattttacacagattgcatttgaaatgccagagttgttgcatagaaagttggacctcgggctttcaaaaaatagaaagagcaggtcttggaaggctacagtcccagcaagggtgatggctcctttcgtaattctcagttcctgctggccaaccttattcattagaccatgggcttggctcttggagacagtcaatgttttccgtagagaatattaccccgcagtggccaggaagcaaatgccaatagatctccaaaatatttgatcataccaatggattgcctagaatatcctgtggtctttctgttgcctttgagagaacgtcatggaataccaggtgggggtggggcaggtgagctcagggtagcaaggattctgacatagcaaagggaaattctgtatgggacagactcaaaggtcccagatgccctctcaaatgaagatggcaatattccaaatattcattgatccataagcatctcacggcaggtataagatctgggagaactcatcttattccatccccaggaaacaaacatcccttcttgggcaatgtctccaggccacgcttctcatccgcagagcaggtgcctgttctccccgggccatctgacaggggagatagaaaatctgcaagagaaagctcacagcacggggctgagccctggaggggaagcacagaggcctgtattctaattcactgatgatcaatttgcaagttctttttctcttagttcccttagtttccttccaggtaatgcagaattccttgaagcttctctaggttgttttactttgcaatctttggtcagaaggtctttctcatgttaacaggtgagttaaggtaagagccccagactcctgggcttcccccagcccactccatgatcccaaaagagattccactgggggatacagtttgaatcacctgaactagacaattattacagcttctcttccaggttgaatatttcagggtcccttgccaaacaggggaagatcttgttaaaccaaaatcccaaatagatttcaaatatgctggaagtttacatgaccctaaagactgctctccatgagagactcaggggctggggtagtaccttctaaatttccatgggaaaatgaacatgctccagcaagagcttgggaaaagaagatagtccctaagttttattgtttgaaatttgtcactcaaggatgtgaacgtgtcgctgacaattatgtagcatctcagagctcagaaagcacttttgcatcgattatttcatttcttgttcgtgccaattgtgtgaggtggacaacgttatgttcatatgagaaatgcagcccagagaggctcaaacccagcacttttaactcccaatctccctcttttctcagtaccatgtggtaagtctttattaaccagagtgtccaattaaccagaacatgcctgtgtcttagggatcatcccagactgattttctttgcagaaaaccccagggagccacagcctttcctgcacctccttttgttagctgtatgtttttttagcggcccagtgaggcctgcatttcagagcctgtgttgcaaagctcattgctgtggaggagacggttatgggctggggcctgggtcttccgccccttcctggcagaccaggagcttcagttgctctctgtgaagttcttctttgcaggagcctgacacagacgacagccccaggtaatccctattcttcaagaccaagccagggaaaatcttccagatgttcttgctactcaccccgaccttgcggtcttacccttctggctgaacaagagacaaacagctcctctccacttggctgtgtgcggcttaacgaatgcgtatgaagaccgtataaataattcacatcactcaagaggtggcgagctgaacaagtcccttctggttacatttatttcaagataaggtgaaactaagtgagtgatggcccagttacagaggccagggtccaaaggggattgggacactctaagttacaccaccagagtgatttgtgcagaactgtgtcaacttagagatcctggcaccttgggggaaagggaaatgtcttatctctaagaaaagtgatacaggatgagtattttccaagtacagcctataagctaattctgcagaatcaatttggctctgccaggaaccaagtttctgctttaatctaagaggaactctgaattagtaaccttgcacatgttgtcttcccttggaaatgtcactaagggactcttcgaagcatgggtgtgggtccttggtgtaggtcctctaggtgcatgaggtggcactttccagaagcatgggtgaacctcccaagggagtccagagtcttttattggaatcaatggatgagaaaaatattgttttgcaacttgagtgaatgtggcctccatgatcaaaacctggactagaaaagcctgtggagtggccctagaacagggcaaggtagagaggagagttttctcctgctgtgaatttaccactcattcctgtattgtagccacatgctttaattttttttcttctcccttttcccacagtgccccctaaatatttccactgaagacttttagaactttggaataaggaaattgtatctccagctgacaataaaatttacgaagcaaagaatgcctccgttaatactttccaaacgtctttgtttttgaacgagcaagatgctgagaaccttccaattcagtaaccctgcctctgacaggcagcagaacagttagcaaggttgacagatagatgcagccacacgatgcaataatccttgctgcactgaactttgtatttaaacacttattttatgtttaattaatttctccaaagaggaaaacttccaggctgcctttgaagccggctgtttgtttaagatattttgttttaagaataagagaaaaaaaggaaggaaggaaacggagggaaaatgtttatgtttttcctgttgttttttcaaatatgatgtgacattgtgaaaaggcctcctgaaagtgcaattttttgtttgtgatggaagagagatgcacctatgagtcttacatcatcaaagaaacagacgcttatctataatttatgctttgctttaagcttctgctgatctgatgtggcttttttaagacaacacaggcagccctggcatcacttgtcaatcatcggggcatgctcaaatcgtagaccattagcaggagggacggcagagtttctttaatgacgcttttatacggggcatcctggcagtgaaacagagagggtttgatttgatcaatgcattagcctaatcacagcgttcctgctcttaatttcttttgtcggcaatttccatacatgggttgcgttcagggttctggcaaaaacccgttcagaactccgtgtgacatgtgcagtcaccttgcccggatttctctcggtgggaagcgacgtctgcaagagaggggacggcggctgggctggatggctgcctttgagtccgtcctgcggtgaggctggggaaggcccattccacgcgagccttggcttcagccctgaggtgcctgccagcccccgtggcagaccccggccctgccaatttcagcccccttggtgattctgttccagcgctcgccaaaagcagaatccgtgtataatgaacaagtttcatgttcaacattttaagtgtctatttatgagtcccagtaattagccctttgtctgcaattctggcgatgatgattagaattccatctcacgttatgaatgctgctccccaaacttgtccttctcgcctggagaatcccaagcaggtgggcacctgaaaggcaaagaaagggggcgatttggggagtggccggtctcttcttttaccagccctccagcagcctccttcctttgatcccattcttccctggctgtatgtaatttcagacttctcagaatccattttcctggcttttgttctgaaacttgttttcttctcatcctccactgtcatccccaaagggtgcatttttttatatcatgccctacacatgatatttgtaccttttgcaaaatcttgtcaggatgctatgaggtttgagagtctttccaaacgaatcattctcagaatcaaaatattatgaaggaggccaaattatctctaattataacctccagaaaagtggagaactttttcaacaaacagaacaggggtaagcatcttacagaaatatttgcaagaaaagtaatattctttttttttaaagctatcaaatcatgtaagcatacaaataaatgtattttaataagggtaaaattactagttaatgagtttgctttggggttttgtatcttcggtacaaaaatatataaatgcttttattaaggttgtacctattattttctaaatgaacacaaacacacaatctaatccatttagcaataatatattttaacatatcacttactccctctgccacttcttattagggtacactctagaaaactgaataataatctgtaccacatagactctcagcatcctttatgactataaaaggaattcgagtttttgatgatatcacagcaatgtaaacagataattggaaagccagggcttcctttagagggaagccagggtcagccttggggcttggaattgggcagtctctttgcaaacttgtcttattccatggataaatttcttcccatttcccccagtacctggaggatggtggtggtggtttctggaggacttttctccaccctgggccaggacttctggggaggcagatggagtagccgtttgaagttctgagttcatatctttgcagaaagaaaagcatctccaggcttccaggaagccctggctggtggctgatgtatggacccaggcagggcaatgattggccagtcatgaaaaattagcctaactcacaacttcctgaagaatgaaggagaggagctgcgaaggcaaacaaccgtgggaaggagaggcccggttcgtggctcatgtctgtaatcccagcactttgagacactgaggcgggctgatcacaaggtcaggagatggagaccatcctggctaatacaataaaaccccatctctactacaaagacaaaaaaattagtcgggtgtggtggtgggcgcctgtagtcccagatactcgggaggctgaagcaggaaaatggtgtgaacctgggaggcggagcttgcagtgagctgagatggtgccactacactccagcctgggcaacagagcaagactccgtctcagaaaaaaaaaaaaaagaactgtgggagggagaaaaggccacagagcactctttccaagttagaacaacgcttgggcatttcttggttctgcccttatcttggtccatgactatggcttgtgtgtgtgtgtgtgtgtgtgtgtgtgtctgcttcagtaggctaattgagtatctaaacaaactaattaatcacaggaattcatacaagatggacaggtctggagaggtgatgttcatcaaacccctccatttgttttttaatccttgcagcaatttatttgctgaatatgcacatttcttccttgaaatttcctagctgtggccaaggttaactgtatacagactcattcagtatttatgattttgcatagtggagaagtttttttttttttttcttcagagtcagagaatctgggtgcattaatcaaaaataatgaataaaatgatccgtctgacaattctcatagccgcctaggtttcaggagaataacgaactaactttattaatcaacagttcctgattaattgttacaaagtgtcatccataaatttcccttcattttaataatacttgctgaacgctaacaatatccccagtgatttcagatttatggcagcctgggcactgcgaggagtgtggcactccagccttctctgctcccccgagcctgagtggctcttcaatcccagcctgatctctgttttcctggcacccctctttctgtgaccccttcttccccacccctctcctggctcctctgcctatgtctgccaggcagagaaaccaccggctcccgggagcacctgtgcttggcaccccagccccaccagggctccccacccatttcacctcttcaggcccagtttcatgaaggataacgtagagaacagcgccgcaacccattaaccatgacagtttcacttttctctcctaattactcgttcctgcctatttggcattttcttagaaaaatttgttgaataatgaccagcattaaaatggaggctcttaagaatttatacgcagagcttaatttatcatgtactttccttatcttgcagccgaatttatttctaagtgtctttgctatgcctgtgacagtgtagtcattttcttaagggcacagcatgtatcggtaacacatttaaaaatgcaacactatttaatcagaagaagctcaggctggtttctttgtgaattgtgtttgtttactgcaactgccggcttgacataaggcaattagtactaattgtttaacccagctgccttgctgagagcaaccaagaacttttgtactttatcttgttttctctagtcgctctttgctatccaattgctgccatatttgctcttgtttccagtgttttcaacagggtgtaattctgcttttgtgaaacgggcaggaggctgtcttcctcaagagaatattgtgaggaggacaatcttcagcaaagttcatctggctggctcttcttgtgggttgctgtgaggtctttgaaagccagcaagaaattgaggtcaaaatggacaacgggaactcaaaaactgtacgtgagcctgggaagacattctctcccccgcctgcttttagctaaacttctgcaaaaaggaaaatcctaaggctcagatttcaatgggttttaagttatgaggagaagctgtaacttcaggctaccatctgtctgcctcgaatattttacttcttgcttattctttgtcaaagtttgcatctataggaggccactgggagtaggaggaaaattcatgatttatcatgttttgatttgcttgtaatggcttaaatatgcttccacggagtctcagagattacatctttccaaaagagggaattgtattagaggtggacatgaagcctccccttggggtggcggagttgttgcaggatggctctggctctggctgaatcagggtgaccctacaccattgttgttcagccaccaggatatgatggttgtcctaggtgcatccctgtggaccagctagggtagcacatctccctgaaagattgcaaggaccctgaggctagacacttgatcacagcaacaatgtcatatacaggacactatggggcgtgtcttatagaagtctgttgaattactaccaggccaatggccaccaattaaaatacaatcatgcactgaataatgacatttttgtcaatgatggactcataaacaatgatggtcccataagattctaatgaagctgaaaaattcctgtcacctagtgatatagccattgtgatgttgtagcaaaattaattgattttttttataaatatggcatcgcccaagtgaacatggcttgtctttttttagacatagtcttgctctgctgcccaggccagaggaatctcagctcacttcaacctctgtctcccgggttcagggaattctcctgcctcagcctcctgagtagctgggactacaggcacaagccaccacacctggctaatttttttgtatttttagtagtgagagggtttcgccatgttggccaggatggtctcaaaatcctgacctcaagtgttccacttgccttggcctcccaaagtgctgggattacaggcatgagccaccatgctcagcctacgttgcttattaaatctacagtagtgtacagtaatgtcctaggccatcacattcactcaccactcactcaatgactcacccagagcaaattccagtctgcaaactccatttatagtaaggactctatacaaatgtatcatttttatgtttcatattatattttcactgtgtgtgttctatgtttaggtatgtttgaatacacaaatccttaccatgatgttacaaatgcctatagtatttagtacagtaacatactgtacaggtttgtagcctaagagccgtaggctatcaagctcagcctaagtgcatagcagcctctgtcatctatatgtgtgtacgtttcccttatgatatttgcacagtgatgaaattgcccaaggatgcctttcttagaatgtgtaaatgcaacattgcaagcataaagatgaacatcaaagaactcagcccaggtgtcaggggatgaaactccacctatgggtgccatagttggtaagtatgacagggagggatgtgggtcattttcccagcttatgattaggtttgttctagcagccaagagtacatgtgctgactccaagtgagttcacacatacagaaatgtttttctctcacataactggatcttcagagataccggacttgatgcatattctagtagagctcaataattcccctggaaatctgggtctttctttttttgaggtcagctttggctccatcctctggctgactgtgcatgtgattgctggctggtggtccattgcagccaggacggcatgctctcattctctttccaggtgaacaagaataactgtttctccaattacgggacattataagttgtttccttcattctgattgaatgcacccacgtcgcttgccacatttggaccaataacagatcccagaagaaaaccatgccgattggcttagaaggctgtggatgtttccaaggctaggaaaataactgagcagaatcaaggctgtgttggaaaggtgtgctggagaggagaccaagtgttacaactcagatctatcagcttatcaaaggaggaagaaagctagctcttgggtgaaatttcccaatgtttaaataaaggcagctaatgcaagttttgccctaaaaacgtcatgtaagtcagtggagcacggtggctcaggcctgtaatcccagcactttgggaggctgaggtgggtggactgcccgatctcaggatttcgagaccaacctgggaaaccccatctctactaaaatacaaaaaattagccgggcgtgccctgtaatcccagctactcaggaggctgagacaggagaattacttgaacctgggaggcggacattgtagtgagccaggattgcgccactgcattccagcctgtgtcacagagcgaaactccatctaaaaaaaaaaaaaaaagacaaagcaaaaaagcaaaaataaaaacaacaacaaaaaaaacaaaagcatctcacaggtcaatcatgtgatcatgtggcacaatgaagcatgattaagcaagacctgactctgattcctgagtctccagttctggttctctggggaagtaggaaactgatggaatggagaaagccaagagtgggtggaattccatccacaggatggtcaagaactctagacttgagaagctcttggcaagtttctccttccgtcttgtggctgtctgggaagaacacatgtaatacatttcagtaggctcccaacagcagcacctcagagacttttaaaaggtcaagagctttcttaagaactactggagagtaacttgggtgctggggaaaattaagattaatatacattggaagttaaatcctgccttttttttttttaccccctaggaaaactcttaatgttagcagaagcctggatcagctgagaaagctacaggttttctgttccaaaaatgcttttgttgctaattaaaattagtctaattttgaaatgatcacatcattaaagagtatttcaactgatgttgatttgatgatacctacaaacatcttagaataaagaggctggtgttttagcattaaaaggtgctctgattagacctaaatctgtgaaattgatgacatgagcttctggtacctcttcattcgtttttttccccttctgcataaaataattatgaatacttcactccatgcaatccacgtttattttattttttacagggttgggggagggctggattaagtgctagctctttgcttgtctatggtattgctctagcaatatcttaattaagtctagagtcaagatgaaatatgtgccccaagtatgtttctaatcctttcaaacttgcaggtttgatgtgtgatcctgggccaagtctttagaatggtgtctcttatgtcaataaatcttctgagacgtgtcagccaggtcattgacatctttggtgaaatggagaactggctctcagaggggctgcaggttgaaggcacagtcccagaggattttcaccttcttccccagggcagggctttttccacagtctcctctgcataaatattctgtgcattcatgtctcctttcctctacttgcctggcaggtcaactccataccttctcctcttggcctatccaaactctaaccacctgcaaaagccactcctgaaatcaagaaggtttctctcctttatctcttgcaggagttaccaatgatgccaaccatttggatgctcaatcaaagtactttagcagatttgtattaagtacctggattcatccatttgacacatatcatagaacccatgcttagagtaatgagaaaggcagacaggcagatgtgatcactgctcctaggacattcacattcagaggtgtgatagggagtaaacagtgaggcacacgcagcatttcagattgtaaaatgctcacaaagggagtgaagagggtggcaggacaggaagattggtgatagaaagccatctgaacaaataaccttttacccctctcccaagataaggaagacatgtccagtgagtggtgattcacttctcatgtttgggtatatctgataaggaaagtcaaggctgctgggccttggccatgacctaaggatgtagcagaacttcatgaggatgacctctggagaggatggctttggggctgagacctatagatgagaagggaagagcctttcaggaagtccatgttgtttcctggagtccactgtgcattcatctaatctttccacctcctagactgagaaactgagaatgccttaaaggccagattggctaaattcatatggatagggcctctgaattctggcagtgggtgggccttctaagtggtacccttcccagtagatacttgctgagcctaactgaaggagaagcagtccagactcttcccattccctaaagagaaaaaagttgagagcaattcaggatgacaatgtgaccctgagcatggaaacctcacttctagaagtgattatttttcttagacttcatgtcaccagtatttcgcaagttgaaatgaaaaccacagaggcgcttcaccatttattgcgagtgaagaaaaacttctaagcttcttttctgccctgactttccttctagactttagaacacctctcatggcccagccataaggccttcctcaacacagagtagggctgaaacatctagcttatggtgtgattatttggggccacactcttattcctttaagaccagcccctcccagaagatcttgcctgattcctccttaagaatcagtgcaagtgccctagaagtacaagcaggccaggccatggtgtgtgtttgcccaacaatgttttaagactctctagtacagtggggattgaccagagctgcttcctttgacctcaaagactgtcatatagtcatgatctggagagtctgtggattgagcacctgagccagagtgaccagcagcaacttgtctgggcatcttgcaagtaacttttttttggtttatttttgagacaaagtcttgctctgtcacttgggtttgagtgcagtggtgttaacatagctcactgcagcctcgaattcctggcctcaagagattcttctgcctcagcctcccaagtagctgggaccacagatgcacaccaccatgcctggataattcctttttagtttttgtagagataggatctcccagtgttgcccaagctgatctctaactcctggcctcaagcagtcctcccgcttcagccacccgaagtgctgagactacaggtgtgagtcactgtgcccagcaacaaaaaaccttttaccaccctccaacgtaaggaagaagtttccagtgaggggtgaaagacagtgacttggcttctcatgtttggggtatatctgttaaggaaagtcaaggctgttgggatccagccatgacccaaggatttagcagaacttcactgaatgttttgaatcagcccatatggcttcagattggatgtccctttggtgctgggctggacctttggctctgagcctctgcacaatcatgaatctgtacaatcatgaaaagcagagttcacatttccccactctgtgagctactagccacaatgaccagtaggtctcacgagtccttccccctacccttcccttgaaggcaacctcttggctttcatcatcatgtttggccacctttggggaaaaggtagaacagttaacatctgaggccactttcaagacaatatgtctcaagcttcgtcccccatggtggtggcacattgtgaaggagggaacaaagaaaccactttttctatcagggactttccaaagataagataattttgttcctcttctgacctataaaaaagttatcaaaaaaaactctagtaacattcattttcatctgcatattatatttacaatgattccagaatagaatacaaatacacacaatgagatttctcattgcttgggattgtctttgcctccaaacattccagatatatcacacagctgttgatttcaatgcccttggagagacacttcaacacacagtaccaagtttcaatgcctactttaaagaggaaccctgaatgcaggacagataatactttagctcttgatttcaatgattttactgtttgtattgaggttttgtggggtgtatttatttatttattcctgatacacagagtctcactctgtcacccaggctagagtgcggtggtgtgatcatgacttattgtagccttgaacgcctgggctcaaccagtcctccaattcagcctcccaagtaggaccacacgtgcatgccaccatgccaagctaaattatctctctctcttttttttttttgtagagatggggtctcactacattgcccaggctggtctcaaactcctaggctcaagcaatcctcctgccttggcctcccaaagtgctttttgtattcttactggttgcatgagttctagttgaatgaataccagaagtaaatattgtatggtatcaaacacgcaaggtagcacacagtgagggtgtaccaagtggaaatttaggaactcagctgaagcccaagtgactggctcatgtgaggctcccaccaagctgtaattatagatgagcggcaagccacccagtgactgtccctccaggggtctgccagtcctgtgagaggagccaggctctatggtgctgatcagcacactcccactttcctcggatggatctttctgatggacagcctgctggctcctgtggaaaaagagaggttaacagaaaaggacagaggaggggcaggggagaaactcctctgactggagaccatggtgtgcacaggccccactcgtctgtctgctggggatgatgcctggccctggtgtgtgaggtcccgctcatctgggttcctataaatctttgagaactctgtaagataagcccagggtcaccaagccccaccccatatcacgagtccagtatgggctgacccattccaacacccagtgtcagtatctgcatcactgtggcttggggctatttttttttttttcagagcactgaaggctactctgcctggacacaacaggtgggatgtgccaaggaaggaaggaacactcccagcagcagccctcagccaatgactatgcaatgagttgcagagaaccacagcacttccttcacaccccaccgggaacgtcctagcatctcccatggtgccaggcatcattgtggtggccatcttcacaatgcatttgctggtggaagaactgtctgtgccacagtcgcattcctgccagcatttcctagggagctgaataaggagaacacatggacacagggaggggaacaacacacactggggcctgtcggcgagcagggggagggagagcacaggataaatagctaatgcatgtagggcttgatacctaggtcatgggttgataggtacagcaaactactatggcacacatttacctgtgtaacaaacctgcacagtcagatctgtgttcagggtcagcttctggagcaatgcaaactgagacccctgaattcttagaatgtcagtcaggcacctggtgggcaggttcctggacctctcattttttactgactatgtaggaactcagatcaacttgccctcacctctgccctgcagtggatgttctggcaaggagatcagataaggaaacagccctttcctacagagagaaagaaccctcaaaagagaggatctggtagcgatttcctggagcagggttgcaaagagaactcctacttttagtaaaggaataaaggaaggttcctgccaggaaggataatgataggattttgaagggtctacaggagctggaaaatcaaatgggatcagaaaaatcacacaggtgggaatattccaggacaacatggagcaccatgagtaggtggttttggctggagtggatgaagggcttatgaagggaggagacctggaagagaaagtggcaaaagaacattaggaagatgcaggaggttgctgggccctatgcatcactcacagaagaatttagaatagatatgaagcatgtatcgatgctcctatctatggaattaaattgaaataagccctcctcggtctagctttggactcaagccattcaaaggcttaagggaataaaacagaaaaaaaagataagaaatgagttcaacctgtcaactgtgatgataacagtgattgcaacattgataaagtgctttagtagaaatatggaatttagaagaaaatgaaatgaaggcagcagactattctcactgacagtgatgttggcaagcaggaaggcttgactgctctgagatgggtcatccccagccaccccacaccttggggttcccacaagcctgggttcaggggcttagtttttcaggatgggaacccatcccattgtgttttttagctggattcaaaatctcccattctggaaatgatgggaagccaaggtcctgagttcactttattagttttggggagagcaataaaacagtctaagatagaaagtcagggcaaaggcaattgcctgttcacaggatctctcccacacacctccttggcttagtttcatggaggctgcatgcaagaaataactaagactcgtccaaggctcaggctgcctaaaatcagatctctgtatatctctaagcatcctggcaatacttccttggagtggtaagtccactgtactgaacggggatcagtgctggggttaaatatgttttttttcctttttccttttggtaaacacttttgaactttttatcaaagtgtaatgtgcatatggctgtggagaaataaaaatgcttttacactgttggtggggatgtaaattagttcaaccattgtggaagacagtgtggcaattcctcaaagacctagaaccagaaataccatttggcccagcaatcctattactgggtatatacccaaaggaatataaattactctattataaagatacacacacgtgtatattcattgcagcactattcacaatagcaaatacatggaattaatccaaatgcacattaatgatagactggatacagaaaatgtggtacatatacatcatgcaacactatgcagccataaaaaggaacaagatcatgtcctttgcagggacataaatggagctggaagccactaccctcagcaaactaacacaggaacagaaaaccaaacatggcatgttctcataagtgggagatgaacaaaaagaacacatggacacagggaggggaacaatatacactgggacctgttggtgggggctggtggagggagagcatcaggataaatagctaatgcatgcagggcttaatacctaggtggtgggttgataggtgcagcaaaccaccatggcacatgtgtatatatgtaacaaacctgcatgtcctgcagatgtatactggaacttaaaattaaattaaattaaaaaaaagaaagaaaatatccacattaacgtgatctattcttcaggaaaaatagttgaaaatgcaaccaactcttggtgaaatgtataaataaatctttgctatactttacttcaaataaattattttaaaataaagtacacaagacataatcacacagctgaataacttttcacaaaccaaatgcatccatgaaatcagcacacacatcaccaaataacattatcagtaccctcagaagtctcataaggccacttgcagttgctaatccccctcacccagaggaagtattctgacatctggattagttctctgttgcttaaaacaacagtatatgtttattatctctcatagtttctatggatcaggagttttggagcagcttacctggatggttctgatttggagtctttcataaggttgtagtgaaaatatcaaccagggttgtaataatctgaaggcctgattggggatggtgaatctgttccaaaggtggctcactcacaaggcttgtaatttgaggatggttgtttgtaggcttttatttctttccatgtggggcctcactaaaggctgcttgagtttccttccaacatggcagccagtttcctccagagagtcacgtgaagcccaccttagaaatcacatgatatcacctccgccacattttatttttttagaagcaagtcgctaagtctagcctgtcttgaaggagaggtaattaggctccatctttcaaagcgaggaatgtcaaacattttgcagaaatattttaaaatcaccacaacttgtaacactgtagattgctttcacctgtttttaattgatatgcaggagattgtacagtatcacatacagtatgtgatgacacacaaaagacattcaaaagtatgtcttttgtgtctgccttctatcagtcaacattatgtttgggaaatttatccatgttgttgcacatagttgcagttcattcattttcattgccatagaaaatgctacagtataactataccataaaaatgtgtatctgtgcaattgtagacagatattgactatcaggaataaagttgctatgacgaatttaggtttctcttggcttgcttgatggtttaaggccagctcatgactctgtcccatgagaaattattgtacagtggccttctctataaggatgatcaagaaacttgttactccccaaggaaagattgtaagtcctacactgaccaaaactgaggtctggtactagcagtcatagccactttgccatttgtgcaacattttagtccccttcccccccgaactttctttcagaaaatacaaagaggttaattagcattagtcacagtttaagaattagccaaaagcctccgctgtttgcaagctatcttttaagaagctgaagcaaaccccatggcatctgaagccagaacacttctctgagttgtcctgatatctcagaaaaggcctggaggagacatgagcaaatgagtgtactcatgggtgaaccatccagtgggaacagtcttgggacagacagatgtgaggttgcctagcaacgcagcatgaccagggagaagggccctcagagggcatctccaaacaggctgtaaagagtggcacacctgaaaggtgtcattccacatgaagatggagaggcaggtggccctgattcccgagaagtccctggtggaggtggagaggatgcaggcaccaggaataacattgggagctctttctttctcccagaaaatcacttcactgactcacactttgtagccctaaacactcatttctctgctcctcacactcacattcctctcatctcccagtgaggaagtcaagcagatgctgtcctgccctggtctcttctgtgcatacagccccacttccacctgctggagcctgcacttcagtgcctgaaacatttcttagggcactggagtcaagacaacagcatggcagtcagtttccctgctctccaacaaggaggcatcctctacccacaagtgccaggagttaatggagaaacaccgtggctgcccctctgatatgttttggctgtattcccaccctaatatcatcttgaattatagtttccataatccccacatgtcatgggagggacctggtgggaggtaattgaatcatggggtgttttcccccactatattctcacgagtaatgataatgagtaagttcttacacaacctgatggttttataaggggctcccccctttgctcgattctcattcttctgtcttctgctgccatgtgaagaaggacatgtttgcttccctttctgccatgtttgtaagttacctaaggcttccccagccatgctaaactatgagtcaattacacctctttcctttataaaacacccagtctcgggtatgtcttttttagtagcataagaatggactagtacaccttccctcttgcaagagggctcagggctgtgtcctatgcaggctcctgcagtgcagttccccattgggatcagacgttagtcgcccacagggcaaaccatttgataagatgccatttattggctctttttcttccttgcctcccctacccacctacccgtgttttttcacctcccaaataaaaaacttgcagttgagtccttgtctcagggtctgctctgggagaactgagacccacacaggtggtcctcagaatcatagcttttagctcatttgttgatttatttagtatatacatttattgctcttttgccctgtgccaggcatggtgcttgttgctggaaactcactgagaaacaaaaccccaaaggagcttcccttcctgttagggagacaggcaaaaaccaggaagcatgaatgtaatgatgggtaagagggtgaatctagtgagaggggctacttgagattgggggtgcagcaagagtccctctgagctgctcaggtttgagatgcctggccaggctcagcctctgtggggctctcccacaggaatgcatggctggccactgtccctccctgccacccccaaccccaatacctggctccatggctgccactcaccatgggctgctccttaggggagactcagccaagctcaggtccatgggccaagtgggtttcttcctatcactgcatcctcagattcaggctgccctctagctccagctctcagttggccatagcagtcttctaaaacctggatccaggtgttgtaagacatgggccacagaactgatgcatgagggaagaataaagaccaacgctcatcaagctatttccgtgtgccagactctactgggggcttcaaaatatatggcctcattgacttcacctaatatctgtttggagtaagtattttatcactggtattagagggggaaactgacactcagaggggcagagtgacttctctgagtctcagtgctaacacaagccaaggtttaggttccggtctacatgtctccaaacccattgtctctggaccacaatcatactgtgtacacagtccctgaccggagtctctcctgggacacttaactttcttttaaggactcttcattctcaccctcatgtccacgctggctcagtcttatcctttaagcccttatgatgcctcattcctccaggaagccttctgagaggaacaatcagagacagaagtcaaaggctggagcccctggcttgcttctgggggaacctgagctggaagtcagcagatgacattagagcctccctggccattgcttattgcctgggcacatagtgaataccactcaggacagggtccagagggcaaggctggctggtgtgtgctggcctctcccccatatcccaggctgggcagcccccactgtgtttccatagtgatgatgacaactatgatgatgaccttattggtcatcattgggtggccacattcgatgctcggcgttttctacgtaatatcttaggtaattcccctaccacctgctgctccacaatcaggtctgttgtaacatgtctgttctctaaaggggcagggcacagacataggtgacagctccatcaagaatcaagcggggatgacgcagtgggctgtgtcttgcacggcagtggagaggatatcactgaactctctagactcattttacaacattctcctgtcattccttgggaagtgttcaacaaagcttcttccctttgcattcatctgagcctggcttctgtcagtgtatgcgcttttcaaaaatgctgtcaatcccccacttcttgaatcagttaattaactagttgagtgtctgtttaagcagaggaaaacccaaattgcgtaggatcccacccacctctctgcaagtcaattcagtaaacattcaccgcagccctgctggcttgcccaacacagtggccacatgggagggacgtggaagaggtggccacctgggtcttgcccttgggagacaggtatgtgcccttccctggctaccaaacaggaaagagcatgtctggtgtcagctctgtccttatataatctaggaatgacaggaagcagtgctggcggtgcagaggggaatagagctacgccttgcagaaccgggtttcagctaagataagggtgactttccctttccgtctgcagcagggagtgcaatatgcacagttcactgggtctggataacttgcacagaaattgaagtgtgttgggagaatcataggaaaggctgaagaatgtgagatccaggtgacagaaattaataggtagctacttcaggaaaactctgctggcatgagatgggtgccaagtgttgaccttacctgtgtctgtccagattgaaaggggagggaggagaaagcaggagagggagcaagagtgagagagagagagggttgggagagagtgggagcctcaatgatgcccagcccctagctggggaagggcagggcccttggctggctgtcccccgaaaactgaccacagtgcctcaagagaactgtcccaatcctggtgttttccccagaagatggagatatggatgcaaagtgggtaaagctacagatacctgctccagggcgtgggggtggagggtgcaacttcgtgcctcagagagaagtgtgtgaagggcctgaattttccctgacaaacagcaagaccaactgggagattacaagcactgggttccttccaaagtctaaggaatcagaagcctccatggatgtctgggtctaggagaattctgagaaagcagccagggcatctctggaacatggatgagagactggaggtgaatttagtgttgtggaaactagagagtccaaagagtggtggttgtgaggagtccttgaaatattaagcatagaattactgtaggagctggccattccacttgtgggcacatacacacaagagttgaaaggagggacttgactggatatttcattccaaaaggtgaaagcaaccccaaaaatccatctatgtatgaatggaaaagcaaaatgtgggctatgcataaaatgggaggtattctgccttaaaaaggagggaaattctgacacatagggcaacatgatgaacctcaaagataaagataagtgaaataagccagttacagaagtacacttttgtatgattccacttatatggggtgcctaaagtagttgaattcatcaaaacagaaagtagacatgggcttgccagaaggtttgggtaaagggaagtagggaattattgtttaatgaatgtggagtttgtttgagatgatggaaaacttctggagttggattcacaacaatgtaaacacgcttaatgccatggaactgtacacctaaaaagattaaaatggtgaatcttatcttatgtgtattttactacaattaaaaaagaatacagagacagggatgggctgcttggaccctgtcaccagagacattcaagcagaagctgcatgactctagatcttggttatgaaatgagactcagatagaagataaggtttgtctcgcccctagactcagggtgatgccgtggaaaggcggctttgcagtcagacaaaaatggatgagtatcccagctctgcatcctagttagctgtgggacttggccgagttgcctaaattctctaagccttcccttcctttgtcatctgtgaaatggatgttccaatgactaccatgctagttaattgtgaggactaaatgaggcaatgtgcctggaaacaaaacccaatggaacccaataaaaaacatctcaggacaacagatacgcacaaatgaccctgagacatgaacagatgctcaatttcactcataacagcagagatgcaaatcacaaaggctcaacacctgaagatatcaattttgacctatcagactggaacatcccatggtttgagaacatacactacatcattggagaggccatagtgaaagagccacaagtattgctggttcaaagcaaaataatgccaaccctgtgtagggcaatttggcagtgtttataaatatataaaatcaacatttcctggtgacctacattatgagatatatatcatataattatctatctatctatctatctgtctgcctgtctatgtatctatctagaggttttcatcctgcctaactcccatagccattatcataatgttggggcacttcaggcctcaggagcagacctcagaaaacagaatctctctctgaccttcttcctcctgtcacctgccccataccctggagaaaaaaatactgcacagagaggccaaaaagaatctgaacggataggcctggctgggtttggatcatgccctttttgtccaatcacatttctacatgttgatcagtcacgcctattcagtgaagtctccataaaaggccccagaggagtgggtctggagcatccatgtggctgaatttatggagcttcctgaacggtggtgcccagggagggcatggaagctcagtgccctttcctttgtacctcacctgtgtatctctccatctgattcatttgtgatagcctttataataaactggtacatgtgtttccctgagttctgtgagccactccagcaaattagtcaagtccaaagagggggttgtggggaccccaacttgaagcccttcagtcagaagttctagaggcccagacttgcaactgacatctgaagtcagggaagtcttggggactgagccctcacactgtaacatctgacgctatctctcggtagatagtgtcagaattgaattgaaatagaggacactcagagaaatgcaagtggcaaagtctccatactctgaagatatcaattttgacttttcacattgaagcatccaatggtttgagaacatacactgttgggagaggttatggtggaagggctacatgtattgctggtttaaagcaaaataaaaccaaccctgtgtggggcaatttgacaatcattataaatatataaaatcagcatttcacactgcagtgttcactgcagaattaatggctcacttggtggtgtgaagaactccccacatattttagggtcacggaagtcttctgtgatgattgttgtgaagagtgagagtaggagaaaacacagtttgaggtttttttctcaaacacctggcaatctcactactgggaaattatcctacagctataccagcaagtatgcaaaatgacataatacaaagttttttttacagtagaaaaatgtataatatcaaaaaacttaaaacaattgaatattcatttataagggactggttaaataaactgtgtcatatccacagaaaagggacagtgtgcagcacaggaaaagaatgaggaagctgcgctaataatacaaagtgacaaaaagcaaaattcaaacaatgtgcctgtgagccacattttcttgtaagagagacaaggaggttaaaatgatatctgtagttgtttctttttgcctaaagaaaccctgtgaggataaacacaaaactagactaggcatggtggctcacacctataattccagcactttgggaatccaaggtgggaggattgcttgaggtcaggggctcagtactaacctggacaacattgtgagaccccatctcttaaaaaaataaaaataaaaaaataataaattagccaggtgtggtggtggccttctgtggtcccaggactcaggaggattcctttagcccaggagttcaaggctgaactccagcctaggtgacaaagccagaccacatctcaaacaaaacaaaacatgtaactaataaagccaagtaactaataaaaataatttcctgtaggtgaagggactggactgggactgagatatctctgggtatacttctaaattttagatcatgttaatgcgttacttacatgaactttaatttttaaaaaatgctaaaaataaaacttatgaaacttcattggagacataaaaagaaaatttaatgaataaattggcatattatgtttctattgagtctagagaaaggctcagtactctgaagacaatcaatttatttcaaattaatcaattaattcaatgcatttgtaatcaacaatgcaacatatagaatctgaaagagttattctaatgttcatcatacaggaaagaaaacaattctagaattgtcaggacagttttggacaaagataacgaggggtttatgttatcaaaatatacctttatagtagttaaagtgtattttaaatacattaattatattttattattacatggaaaaagaaagatacattaatgaaaaagagtgcagagtctggaaacggacccatatgtctatgaaaatttacagaataataaaaataaaacaagatctttgttttacaacattaatgcagtgaaatgcaaataggttagaaatctacagatttaaaaacaaaactttgaaagcacaagaataaaatgcagaataatttttagggtttgggtaataaagactttctaaagcaggagagaaaacttagacataataaagtaaaagagtaatcagactttattggcaatttaaaaatcaccatacatacagttgtttcaatttaccagtgacaaacagaaattaaaaattaaaaaaatatttgcaacagcattaaattttcacctcaaaaaaataaatctaatgaaaagtatgtgaggcttctttacaataattataaagtattatcattaataatcatcactatattaccttttattatttaataatgaaatcattattactaagatgtaaatgaatggatctatataccttgttcttgggttggattttagctatgccaattctctccagatgatttattatagttgatgtaatctcaataaagacatcaatatctgtttttggagaaaattggcaagctgacttaaattttaatgagactataaagggctaagaatagccaagatactccttaagaagaagaagaaggtggaaggacttactcttctggttattcaaagttatgatgaaactacagcagtgaagactgtggcattggttcaaggatggataaataggccaatgaacaggaaacaggtcagagagagtcagggacacttgatccatgacaaaaagcacactgcaatggggaaacgatgtcctttcaataaacactactaggccaattgaataatatagagaaaaaggttgactccctacctcacaccaacctgtccatatacaaagatcaattccaggtagtttataaatctaagtgtggaaggaaaacaataaagcttctaaggaaaacattggagagttttcttatagccttagggtagaaaagacttctcaagtaagatatagaaagtagtgtcatagaagaagattgattaattgaactgcattaaaatgaaaagcttttgttcattaaaagacatcatgaagaagcaaagataaatcacagagtgggagaatgtatttgcaaagcaaattaccaataaacaacttattcctggaatatataaagaactcctgcaaatcaatacaaaatgacacacaactgtgccagctattaatttattgcctctcagctccaaattcacccaatttccccctagtttgcaatactggagctgggatctgtactcagttcctgctttgctcagtggctttatgtcaggctgtgtcaatagggatcactgatggaggctgcaagaatggaagagggacagggatgttttctctccctggattttgccattggtggtaagcagaacagtccaagggccgtgagttcctgcagcgcccctgtgacagtaggcatttctcatggttttgggatagcccagcaagctttgtctttattgcagaggcatgtgacaaagttctgcaacagctgcatcatctcaacaatctgaatctctgtttttagaggcctcttttctaagctgccaagtttcttccttggcttccttttctctcagccccaggagtggtcgctttctgcagctgctacccagatacaacttagagtcctcttttacctcttttggttattcgccatctcttgcctacttaagaaatatttgcaatactttttttctttgttcaaatttctgagtgtggaatcattctcctaactgaatcctggcatatacaacaacccaatagagaaacgggagagactcaaacaggtacatcataaagaggatgcccaaatggcaaagaaacatatgaaagagggctcaccttcattactcatctgagaaatgcaaatttaaggcaaacacaataccactatccacccattagaatggttaaaattagaaagactcacaataccaagtgttgatgagaatgtggaacagccaaaactcttacaatgctgataggtccatgaaatgatgaaactactttgaaaaagtgacattgtctatactctgtgtatactatgtggcatacacccaactgcaaaggatataaagatacactgaaaaacatgtacaagaatattcatggcagcattgtttataaaagccaaactctgaaattaaaataaaaacaactcagaggtccatcagaagtagaataggtaaaatatgatacaatgattaaatgcaatgttatacaaaaacagaaacaatctgtacctatgttgtataacatggatgaatttcacaaacatgatactgaccaacagaaataaggagctgggtgctgagaagtatatgacatatgattattctatataaatttttaaagggctaaactcatcttttgatagttatcattgctgggaaatcattacctctagatggagaaaggaggtagtgactgggagggtgtaagaagggaacctcatggcaggtaaaatttttttatttcttgacctgggatatgttcattttgtgaaacttgatgaactcactgttttaaaatcatgtacttttctgcatatatgttattcttcaattaaaaagtaaaaagaagacagaaaaagaaaaggcagcatgttaagacaaaatacttaactatattttattagtgaaagtttaggatccaatccacataaagagtttctgtttaaaaatgacaaacaaccttagagaaaaatggacaaagattataaaaaacaattcacataatacatactattatccaatataaaaggcagattcccttagtttctctcttcgaagcctgggaaataggtacttaaacaccaatggccttgactacccatttgaataggaaaacaaaaggctgacaaaatgttgggcggggggatgtgggaaaaggggcatcagtaccccttttctgactgtaccatcagtcagatataaattgttaaaattcttttggaggaaaatttggcaatatttatcaaaataaaaacaggactaacccctagtccaccatttcacttctagaaattctaaaataacattcacgcatgttcaaaaagatgtaagcaaaataatgttttgttttgtttttctttgagacacagttttgctctgtcgcccatgctagagtgcagcggcgcgatctctgctcacttcaagctctttttgatgccattctcctgtctcagcctcccaagtagctgagactacacccagcacccgccacggtgcccagctaattttttgtatttttgtttttttagtagagacggggtttcaccatgttagccagggtggtcttgatctcctgacgtcatgatccacccgcctcggcctcccaaagtgctgggattacaggcttgagccaccatgcccagccacaaaataatgtttatcgcagcatttttttcttgtaacataaaaaagaaatgggaaattaagtctctatgaatcagaagaaaatcaagtttcttcatacaatggaatactacatggctggtaaaaatataatggggtcctctgtgacttaacgtgacaaaatctagcgtaaggctaactcatgaaagcaactctcaaatcagtgcattaaacattatagcattcatgtaaaagaattaaatactcagagtatgtttgtaagggttgttttcaagtttgtctctatagcctcatagactacttaaatataccataccagaatatttttaagtcacagaagtaaagcgctaataagcaaaaataagcatttaaagtctcctccatgatgcctgctagatagtagaattcttattccctgatgtcctaatggcagactctggctgatgaaagtgatcaacacctaactatacaggcatttcaaacaacaggatttatttacggaggacaggaaggagggagcagaaattcttgttcagaaaataaattccttagaatttcattgagcttgtttattcttggcctactccatgatatggaatacttacttggaccatcttctatcggtttagggatggtgggatgctctctgtcctggacaaggctgatatggatccatagaaataaaatgtgagcctcctgtgtgactttaaatgttccaatagcgaaatcagaaaaaagtaaaatgaaaccagagaaattaattttaataatatatgttattaacccaaggtatgaaaacaattattatctcaacatttaattaatataaaagtattaatggaatatgatgtattcaattttttggtaagatcttcaaaatctggtgtgcatgtcacacttacagcccatcttgatttggatgctatgtttttcttgacttgatctgtatttaaatttcacaaacttcccagtagattcaaatacctaagttgttttgaacatatctaagcatatgagtttttcaagaacagaatcaagtatcagttttttaaaatttggatttagacagaatgaagtaaagttaaaaattcagtgcctccattgccctggccatatttcgagtacccagtagccacatgtggccagtggctccatattggacaaggcaagtggagaccagtcctcccatgtggtcttggaggtgggtcttggcattcttgggaactgctgccccagccagctgggctccctggccatgttagctcttctctgcatcctgaacacgtgggagctgcaggcactgggacaaccaggcaagggctggagctctgccagcttccagggcaggcagctggtcccacttgtctcagacacctggctgcctgacatttacccagcagcctcggctccaccatgcaaagctggcgaggacagaccagggttcctgcaggctgtgaagggctctgcagagggactgcattcctgggggatgagcctgaccttgggatgaacccagtgggatgacataagccatgatttcacaacatggcagtgatcacgagctctctgtgagctggggtggaccgcggtttctgctgagagcatggcggctacaggggaaactgaggcagcccacagctctgtcctgcaccaagatctctccttcaagacaggtcccagagcctcagcatcatcaatccctgggacacacatatcagtggcgagaacttgtatttcctctgaaaacggaagggctgcttttccacatcttgagaagtagctatttttctctttcttccttaaatcagtgatgaagcttctgttcaagtttcattctcgagaactgtgcagaagcttccctcgctttgcgctctgggctgggaagactacatggttccatcagtattctgtgttctcattttggtgaaattgaaatttcatggattaaatcacctctcctatgtacccagtacatgccatggagacaacccaataaaaggcatggtccctgtcctccaggatcccacagtttcatggaggaagtcaaaggagacttctttttattaaaaacagtggctcacaaccttgcctgcacagtagaatccctggaaagttttaaaaagcatcaatgcctaggatgcaccacagaggttctgatttaattggtctaggatgcagctttggcattgggattttattttgttttatttattttattttattgtttgagatggagttctgctctgtcacccagcctggagtgcaatggtgtgatctcagctcactgcaaccttcgcctcctaggttcaagcaattctcctgcctcaacttcctgagtagctgggattacaggtgcccaacactatgcccacctaattttggtatttttagtagagattgggttttaccatgttggccaggctggtggtgaactcctgacctcaggtgatccacccacctcccaaagtgctgggattacaggcgtgaaccactgcccctggccggcatggggatgttaaaagcttctcaggtaattctcctgtgcagtctgggtgcgagtgacagttttacatctcaagtccatgaccttagggacaatcaactgggtcccaggaactctaattgaatcccaggacttctgtgttcaatgtagcctccaaagttatcctttaggttggctgtggtggctcacacctgtaatcccagcactgtgagaggccaaggtgggtggatcgcttgaggtcaggtgttcgagactagcctggccaacatggcaaaaccctgtctgtactaaaaatataaaaattagccaggtgtggtggggggtgcctgtaatcccagctactcgggatgctgaggcaggagaatcgcatgaacccgggaggcagaagttgcagtgagccaagatcatgccactgcactccaacttgggcaacagaacaagactccctcttacaaaaacaaaacaaaacaaaaaaccacatgacaacaaagtgatccttcgaagtgtaaattaggccgtaaccttcttctcttcaaaattctctgttggctccccatgtccctttaagtaacagtcaaagcccttgtgtctcctgcaaagtccatatgacgggcttcccatgatgtctgggacccatcttccatgcccctctgcctgcttgctccctgggatccagccgcccgtgcctcctggccttcccttgaataccccaggctcagccttgacttggagcttttgcactgggtctttctcctgcttcctcctgtctggggaatggtcttcccccagaaatacacgtggccaactctctcctctccttcacaccattgctcacatattatcttctcagtgaggctttctctggtcctctcccagccctggtgcccctttacccagctctccattttccagcgtacttgtctccttccaacgtactatatgatgtactttctagcaatgtctgtttgttagcacctgtctctcctgctagagatgtgtctactttgtttgctgatgtattcctggtgcctaggatgtgcccgacatgaaatgtgttctgaaaatatttaataaatacatgaaaatctggagagtcctaattaagacagatttctcagtaaatgaagatgatgattttagatgtttaatgtcccacatccagattctaacgagaataacaacaggactatagtaagagtgataaccaacaccttccttggaaaatagggaagaggtgtgctacagaaaggtcagaaactgcaaggaattcctactaaaaatagcaggagcctaggcgtggtggctcatgcctgtaattccagctactggggagaatgaggcaagagcatctcttcagctcaggagttcgcggctgcagtgagctatgcttgtaccactgcattccagcctgggagacaggatgagactcccatctcaaaaaaaatacagtaagtaaatgacaggtcaaaaaatgaagaaaagacccaaaagaaatgcgcacctgcttgtctgagaaagcaggaggtgtcaggagactagaagagactatggcagatccatttacacttctgcattgtaagtattgagaatggagctgtgggcaggtcatgcgattgacgtgaactccttgttctttagctgttatgggtcaacactgtgggacgtagctgctcagagaggttcaagtgtgagtacagtagtgcctccttatattcgggggatacattccaaggcccccactgcatacctgaaactgtggatagtactgaaccctgtacatacatacctacgataaggcttaatttataatttagtcacatagttagggattaaaaacaataactaataataaaccaaaaaaaacaaaataagtaaaacaagggctgccgggctcagtggctcatgcctgtaatcccagcactttgagaggttgaggtgagtggatcacctgaggtcatgagttcgagaccagcctggccaacatggtgaaaacccatttctactaaaaatacaaaaaaattagccaggcttggtggtgggcacctgtaatcccagctactcagaaggctgaaacaggagaatcgcttgaacttgggaggtggaggttgcagtgagcccagatcgcaccactgcactctaggctgggtgacggagtgaaaccccatctcaaaaaattaaaaaataaaaaataaaaataaattttaaaaaataaggactacttgaatacaagctctggaataccaagacagtggatatactaacctataagtgactaatgggtgcacagtgtctacagcctggatataccggacaaaggaatgattcacgtcccagacaggactgagcatgatgacatgagattttatcagctactcagaactccacactatttaaaagttatgaattgtttatttccggaattgttcatttaatattttcagaccaaggttgaccctgggtaactgatactgtggaaagcaaaatcttagataagggggaacaactgtaataacagctgcaaatacgaaaccccaggcatggagggctcccagcacggacatgattcttcccaaggtagtggaccggacctcggggctgggaagcagtggtattccacattggacgtggaggcagatctaaagggaaaactccatatggaaagctaatcctcagtgtttggcttaagcaaacacagaaaaggaactgtagcaaattgaaattttcctgctatgatcatctcccaggatgctttctgctcctctccagtcgctgtagaactaaactggtttgtaaacttctgtcaacccatctttcagtttcagatctgaatgtatccaggtggacagggagggatgagggggagaatcagctcacactgtttggggcatttacctagtttggtagacttcttcttgttttagcttgaataatgtgaccaaaaaaaggtacctatgaaaagactctgcattatttaagcaaaagaatatggcagttataacatacttaaaatatactgcattatttaccatgtgctttcagttaaattcagaaaaaaataaactctgtaaaatgaaggaaaagatgtgaaaatgagcaaacagactgaaatgaaatggaggttcctgaattactaaaatcctgtaaataaatagatagaaccacagtgcaggtgaaaatgacattataggcattaaatggcaaaagtgataccagaaaaaaaaaaaaaacaaatgaaggatacagaaggaaaacacgataagctccaacagggcagaattttcttttttagctatgaagatagacgttctgagagtcaggatgagagagacatggaggagataagcgaaatattgaaatattcatttaaatacgaaatattcaaatatccaaatatccagatttaaaatataggaagaaatagtgaacaaaaaaatatataccattgatattcccccaaaaaagagacaagaaaaataaaactgaatacattatcaaggatataatagtataaatgtattttggatttaacaaagacattaatctgaagattcatatggctttacatttacaataccattgatgaggttcatgaaaagtgattagtttttgcacataaattttgtaaaatatttttatttcaaaggaaaagaaaaactccataaaggacagaaaagccaactaaaacagaagaaagatcaggctgttttcttacttgtgctctgcagtgttaggagtgaaagtatgatgaaactggcaaatttgatgtccagagaaaaaacttttgctacagaaaactttaaaatgtggcacacagtccaaggcacaaaagcaggacaggagacaaaacctaggtgtgcactagctgggtggtctgatcagaagcagctatacatagaaccctagaagtgaacgagggaagaaacacactccacagaggaaataaaatatccttgtggcttgtcttaggctctagttggaataaaaagaagaaaggttttactaagaatttctaatataaatcattgcatgagtttgggactgaaatttatactacctgtgtggactgaaaatctccatgaaattttattttaaagtgatttcaaattggcaatcctcacatgtctaggagaactaaactaaatcttctttggaagaccactttaacttcagatttcaaaaaactccaatagataaaaattcctgataatatgtatccataatcagaaattacaaatcacatgaggcaacatgcctgccatagcaaaactcagcaaaaaaaaaaaaactacagaattatcacaaaacctatagctaccacaatgataaaattcagaatattttaaagtatgtttattataattaaataaagagtttccaaagtgtgattatggaactagaaactatgaaaaatgaccaggaaacttttgaaaaagaatgataaaatccctaggacttaaaaaaaactcaaggcccaggataaacagacatagaaaatagagtaggaaagtctaacatgtcttttcagagttctagaataaacacattgagagaattggggaaaaggtaatatttgaagataaagtggctgcaaatttctgaaattgattaaaaaatactaattgtcagattcagaaagcacaacttctcccaaactgaataaatctacagctgcaaaaccctcagggcaaaaagtggacagaaaatgaagaggaatgatgcatattaatgataatttctctggaaatggaaatatgaacagcaatgctagaagctagaaaataaaacaataccttcaaaattttgaaaaaatattactctaaacctggagttgccaggtgtaaaattatatcttgcaagaatgaagttgaaatacatatatatcaacaagaaaaaattgtagagtttaaaaagaataggctcttaaaaaggaaacttctaaagtccattgtttgtaattcagaaaaaaaaaatctgaggtgtaggaaagaatggtgagcaaagaaaattatacacatgtgggtagaactaattaaataatacaatgtaaaacaaatattatgatttataaagtgtacagtacaaactgagtaaaaataaaatattgggcaaaaacagcatatatcagtgtcaggtgttaaatattctaagctgattctattaatctgaaagagggaaaatctattaatgaactagaaaactgaaaaacagaagattagaccaatcacctacatttaaaataccgaaaaagatagaaaaacagtgaaaaacaacaaaaacccccaaaattaaatgatagaaatattatcaattataataatctgcacaataaatgtaaatgaattatactttctaggtgaagaacaaaggtttttagactccaatttaagaaaaatattctgtttacaagaggaacacctaaaatattcagtcacaaaagtttgaaagtaaaaaaatgaagacaggtatacagaataaaaaccaacgagccaaaaggaagctagtgtagcaatatcaacgctatacaaacttagtaattcaaaatgaactactgaatataaagtatatcacaccgtattgtgccccaaacttctatgaatttaatgcatagctttacaatatgcaaatgaaacaatgaatattactgaagcagaacaaataaatccatcatcttgcagaagattttagcacatctttttcagtaaattatagaacaggtagaagacaaatgattgaatatatagaaaatttaatccataaactaacaaacttaattaataggtaatataaaataacattcttaaattcagaaaaattctttccaaggatacgtggaatatttattaaaatgaaacacatgcagtaagacaaaaatttcaaagaactgatttcatactgaacacaacatggttaatttggaaattaaaatgagttttagaatctcagacatggaaatttaaaaatgtatctccaggtagcttattatatctattaattagaaattagtaattaataatgttaaaaatactttggtttatacacacacacatatgtatttataataactcttggaaagccaagaaagttgcatctaaaaaatttataccatttacattggaaaagaggcaaatgttaaaatagaatagaaattaataaaataaaaagtattatgctagagaaactgagcaaagctaatatttggttgttttaaaagaataataaaatagaccaactctggcaagatatattatgaaaacatcatagaaagaaagcacaaatacaattattttgagaatgaaaaaagcaaaaaggttaaactgtgatttaaagaaagtagtttattttttcaactttatgacaatatatgcaacatttaattgaaatggacaaattcttaaaaaaaaaaatcaactaatctgaccaaaggagaaatctttaatttctagagtcctatagccattgaataccatgcatcagtagttaaaaaaataaattaattaaaaaaaaactttccactatgaaacactaggcacagatgattttatagatacattataccaatgaagaaataatcctaaaccttcacaaacactttaaagcaaaacaaaacaaaacaaaaaaacaagagggtacaattcccaaattatgttatatggctaccacaacacagatatatcatagctagactaggacaatgtatgaaaaaagttacaggctaatcttactcattagtatggagcagaaacctatatcccttcagctaatgacttgtgaaaagataacatgcaatgaccaagtttgttttatttcaggaaggcaaagtaaatacaaaaattgtgaaacttataaaagttgttcatcatattacattgagaagatcatgttaaactcttttattctgattactgttttctaattctaattttaattttcttaatgtttgtttcttatattttgcaggtacgtttttatgtgcattcacatttagaatggaggagtacattcacttggatttatccctttttcattatgaaatatatctctttgtttttagcaatgtttgttctaaagtctactctatctgatattgctatgactgcactagcttttcttggttagggtttgcatggtatgtcttttctcatcctttcatttttaacaactctgtgttcttacgccccaacttgtgagtcttaaacaggatatagcttggttttgtctttatactcaggctgccaatctttgcttcttggagcatttactcatttatatgtaatgtaattactgttatattgtgtttattgtcctccatttttttttctgtttctacttgacccacttgtttcatattctttggcctctcctgtcttgacttcttttaaatcaatcagacttttcattattctcattctttcctttattaatttattgttatttgttattttattattcttttagtttttaccctaaagattacatcatttattgatgtgttaatgtctaaaataagttattgcctttccacttctctgattatgctcaaaatctgagacattctaagtccacttaaatgggtatattccattatacccatctaatgagttctaatcttaatgtattttaagtttttctaatttccattcatttcttcttttgattatatatatatatttgcttcttcttttgcagtcttgctgtcatatattttaattttccatgtttcaaacctcatattattaataccattatcttttttttttttttttttttttgagatggagtctcgccctgtctcctaggctggagtgcagtggtgtgatctcagctcactgcaagctccgcctcctgggttcatgcgattctcccacctcagcctcccgagtagctgggactacaggcgcccgccaccatgcctagctaattttttgtatttttagtagagacggggtttcaccatttacaggatggtctcggtctcctgacctcatgatccgcctgcctccattatctttttatacagttgatttcagtccatgtacatatatagtcactgctttgctttcttttccttctttcaattctgtgattccctgcagaattttttttgtattagactcaactatatgaacttgctattattcatcagttttcatcaacacaagcatcactatcatatagttcaacctaatattaccttaacgcatttgtctgaataacctgtgtaacttttataagatggagtcttgctttgttgctcagatggagtgcagtgattattcacaggtgctatggtagtgctacagctgcaaactgctggattaaaaagattctccttcctcagctttctgagtaactgggactgcaaggcatccactactgcacctggctgtgagactcgtgtctgttttttattttgtctcttggtcatgtggccctgaattttggtgtgtgtactactttctttaaatacattgttaagtacacaaagcacacaaatgttaatgcgtaccttgatgcctttttagatatgtgtatccctgtgtaatttccatctagatcaagggatacagcatttttagcagttcaataggttccctcatgccctctgccaattattatctctccaagaatagttgggggagttatacttgttttcaatttcatgtgaatgaaatcgtggagttgatgtttcttcccttaactttatgtccatgagttcatcaatgctgtgtctatcaggattttgtttcttttcgttgttgagtagcattccattgcaaaaattgaattttttatacagttgaaatttatttatacaattaaaaatttttaaacagttgaaatttttttcaaatatatttatccgttctactatttatggacacatttttcatcatggtggttttataaagaatgtagctataaacattctggtgcatgtcttttggtggacatgaacacccactttgggagaagatttatatactggtaattacagttattagatgataatatgtatgtatattttgatttagtaggtattcctaaatagttttacagaatgattgtgccaatttatattcttattagcaatttaagagaatttcagctgttctccatcctcccaaacacctggtaatgtgagtcttttaaatttagtctttcttgtaagtatatagcagtgtctcatgagctttatttgtatttctctgatgcttgaacactttttcatatgtttattggcgatttcaaaatcctctgttgtgctggacaacaaggtgaaacctcgtttctactaaaaatacaaaaaattagccgagtgtggtggcacatgtctgcagtcccagctgcccgaagggctgaggtgggaggatcacatgagcctgggagttctaggctgcagtgagctgtgatcttgccactgcactctagcctggaccacatagtgagtgagaccttatctaaaaaaaaatccaatcctatattgtgaagtgcctgttcatatttctttcttatttttgttagggtcatcaaaatttttctaatttatttgtagaaacattttttttaatactctgaatttgagtttacagttgaaggtttgtactggaaatatctctttcatgtttatggcttatctgtttattctcttaaaggtgtcttttaatgaaaagggattcttaattttgattaaatcattatagaaatcttttatagttggtatatttttaatcttgataaacaaatgtttgccttattcaaagataattaaagatcttttcctactatgtgtctcctagaaaactaatttatttttattatcatatttagttcattggttcatcttgaattaatttttttgtatagtatgaaatgggggttgtattagccaggaatctccagataaaccctaccaataggatagacagatacatacatacacacatagtaaagtttattgtaaggaattggctcatgccattatagagactgagaagttccaaaatttgtagtcagcaagtagagatccaagagcactgatggtgtagttccaataaggagccagcaggcttgagacttgaggataaccagtgtttcagtttgagtctaaaggctggaaaaaaccaacattccagcctaagtctgtcaggcagaagaaatttcctctaactcaagggagggtcagcctttcgttctatctatctaggcttttaattgactggaggagagacaccgacattaggaagtgtaatcggtttccctcattctaccaattcaaatgttagcctcaaccaaaaactccatcacagacaccccgagaacaatgtttgaccaattatctgggcaccccatggcccaatccagttgatacacaaagttaaccatcataaaggtcaaggttggcttttatctttgtgtgtgcgtgtgtgtgtgtgtatgtgtgtgtgtatacgtatacattgttgtttttcatcatggtgaatatggcacaaagctatttggtatatcagataaatacaaaagaaagctcagtaagacacttctctatacctatatgtatacacatacacacacatatgtgtgtatatccatatatatgtatgtgtgtatatgtgtgtatacgcacacacgtatatatttgacctatcaccatttcaaaaaatgaccatcctatttccactgaatgttgtgtgtatcctttgtcattaatgatatgtctgtataaggtggttgttaacacaatcaataatgttgactgaaaatatagctatatacatatgtttgtattttaaaatattttctatttttactaaagtaataaatgtgtatagtttaaaaattatgccgtattaaataattctgcttcactcctttattctctcctacttctacttcctataagtgatggcttttcatattttttctattctaattaatacttatgttgctacttcttgatttatgaatgtttcatattatatactgatttcttgttttattagctacattttttgtttttacatatctacccccatttcccttcctctatctaatcaatatatctatattaccatttgtgagtaaatcattaattaatgtttatattaatatgaccatattgttttctgactagacaagcagtgtacagtaattgttttgtacaactttttgcttttttggcactgacaattgctttgttttataatttaattagtgttctatgtatggggagccatttctccctaagcgctccaaagacctgtcaaatacctgtcagtaattttccaagtgttcagacacattttcaagcacctatatgcatcccacccgagagacttccctcatataaaccttagtgaacttggtctcccagcttacagtgttacagcagagaagcagagtttttatctcatttcctattcctttgtatatagccagtttgcatttttgattgtttttcctcttggaatctcttaggatctactttttatccctggtgttctgaaattgtgtgatgctgcgtgtggctggcataggtcttttcaatttaatttaattaactttttgcacatttccccgtacgcttcatgggctcaatctggccattactcagcaattactcggcactatttatttgatgatattcttcccacagttttctcccactggtcaggtgtgggagctcctggatagatctaacaggcttttccctttctctctccttacattcatctctttatcactttagttctactatctattttaatctcttccatctattgtctgttcctccaagttcttttctatttgcttatttgctttattttaaaaattttatttaattaatttttttaagagacagggtctcactctgttgcacaggctggagtgcagtggtacgatcatgccttattgcagtctccaactccgaggctcaattgatcctcccgcttcagcctcctgtgcagttgggactgcagcacatgccactacacccgactaattttattttttattattctgtagagatggagtcttgctatgttgccctggctggtctcaaacttctggtctcaagctatcctccttcctggggctcccaaagtgctgggattacaggtgtgagccactatgcgtggccggctttaattcttgtgcccctttttgtcttggtctatgcctttcatgtcgagtcttttctctcaggtattgggactttgggctgctcactcatacttaggagcaagactttaagctcattggaagctctgggtatctgcaccagctatccgcagtggacctccaccacgatgcagttagacggccagcttttttgtctctctggtacacataccctctaaagacaggccttataagcctctttattggtgaccacttggtttctcttgaaaataatcctgcaatctccccacctagtggtaggggttatgccaaatggctgactcctgggaacagggcaaggaagagaggtggggtgtgagcattctggatgtaaacttatttattccttttgtggtttccccacatctgcagcctctcaattccaaagataataaaactcctatttcctgcagagataggaatggatatttccatggccacacatggaagacaaggagattggaaaagacatgggggtggcacctaactgctcagtacagatgtgcaaccttggaaactggtgcccccaagtccaaaacctccccagagtcccatggggaaaattaatttgtttttaactgtgactacctctgtaggcacaaatatttctgttttcttagcccttctgactcatttacccccattctgttttctatctttgaaatctaacttacatctatgaacactgttgattcatcctctattatctttatctttatgggctattattacttcagttactttactattgcaccaatagagttttgggagagtaaaacaattcttatttatatctaaatctctttacacacatgcaaacacacacataattattcccaaaataagcagagaatgctagttaaaaataaaacttctactttcacaaagattaacacaaagaaaatctcaaccaactataaaatgtaaaaatacaagcccatattctgtgattaaaatacaataaaatgcatagcaaaataataatcctatccacttgtcaataacagcaactgttactagccccactattattattattaatattattattactactagtagtaaataactcctggaataaagaggaattcaaaataacttataaactctttaaaaatgaacagtaatgaaaacatcacatgtaaagatctgtgaatactcacatgaatatgtatagtctaacacacatatcagaaaataaggaagataaaagaataaacctaaaaaataaaaaaaaaaagccataaacctaaaactcaagaaactagaaaactggtgaaaaaataaactgaaattctatgtgactatttcataaagataatgggaacaattactaaaatagaagtttaaacaaataaaccaaaactcagaaaggttgcttaataagattaataaaaataaaatttttcacaagcctaatcaagaagaataaagaaggaaaaagtaaacaacattagaaaaaatggggtagatgcataaagattaagaacattatgaaaagttatgtgtaatctacacacggctttatggtaacaaaggtgaacatttaaaccagtttttttaaagataataaaagtggaaaaaaatcaactaaagataggatcgactacctaaatatactaacaaccatagaataaaatgaaagggactcacatagcaatccctaaaaatgttaacaggatcagatggctttatgggtaagttctaccaaattctttttttttttttttttttttttttttttgtgacagagttttgctctgtcgcccaggctggagtgcagtggcccaatctcggttcgctgcaagctccgcctcccaggttcacacgattctcctgcctcagcctcccgagttgctgggactacaggcgtctgccaccacacccggctatttttttgtatttttagtagagacggggtttcaccatgttagccaggatggtctctatctcctgacctcgtgatccgcccacctcagcctgccaaagtgctgggattacaggcgtgagccacagcgcccggcctattctaccaaattcttattgaataaaaatgatactatatatcctatcaactgtttcagaccagaagaataaaaatggaaagctcctcaactaattctagaatcccagttcaacttcacacctaaaccaaataaagagctttctacaacagacaacaaatcaaggaaaaggaaagaaaaaaaaaactagccatgcttacatttgaacatatactcaaagatactcaaagaaacaatgcagatattattgtaacaataatataaacaatagcaagctttgacccactatggttaactcaggaagatagaatggattcaacattagcgaatctatcttataattaactaacttaaaagattgaacagaaaaaaatgtgataatcacaaaagatgatagattttaatatccattcttattaaaattattagcaagctagttataacgaggaagatacttgttaaagaattaagaattacagcaaatattttaaaatagtaaaatattagaagtctttctgtttaagtcagaaaaaagaatgctaacactccctgcaacttttcgcattcttctcaaggttttagccagacaacaaaaagtaagagatgtaaaactgaaaaagaaaagaaagattgcctctaaatagttgacttaatacatgagtgtggtatgagattaaagtaaaaagttcaccatactaataactttcctcagctccagccatcgccaagtagaagataattaaaaaaagatgctaatctgaaaagaacccaaataataattaactaaattcctaggaaaaatacctttcttttcaaagttttcttaggtgatcttatttgagtgtcaggctaatgtactgaactatttatttgggtatgtgtgtgttagtttgtgtgtgtgtattcgtatgtgtgtattggtttgtgtgtatttgcactggtttgcgtgtgtgtgtgttggtttgtgtgtatgtgtgtaacggtttgtgcgtatgtgtgtagtggtttgtgtgtgtgtattggtttgtgtgtattggtttttgtgtatattggtttatgtgtatatattggtttgtgtgtgtattggtttgtgtttgcattggtttgtgtgtgttgtgtgtatgtgtgtagtggtttgtgtgtgtgtattggtttgtgtttgcactggtttgtgtgtgttgtgtgtatgtgtgtagtggtttgtgtgtgtgtattggtttgtgtgtatgtgtgtagtggtttgtgtgtatgtgtgtattggtttgtgtgtgtgtattggtttgtgtgtgtattggtttgtgtttgtattggtttttgtgtgtgtatgtgtgtagtggtttgtgtgtgcatattggtttgtgcatatgtgtgtagtggtttgtgtttgtgtattggtttgtgtatgtgtgtattggtttgtgtgtatgtgtagtggtgtgtgtgtatgtgtatttgtatgtgtatgtgtgtattggtttgtatatgtgtgtatttctatgtgtatgtgtgtattggtttgtatatgtgtgtatttgtgtgtgtgtattggtttgtgtatgtgtattggtttgtatatgtgtgtatttctatgtgcatgtgtgtgttggtttgtgtatgtgtgtattggtttgtgtgtatgtgtagtggtgtgtgtgtatgtgtatttgtatgtgtgtattggttggtatatgtgtgttggtttgtgtatgtgtgtattggtatgtatatgtgtgtatttgtgtgtgtgtattggtttgtgtatgtgtattggtttgtatatgtgtgtatttctatgtgtatgtgtgtactggtttgtgtatgtgtgttggtttgcgcgtgtgtgtatttctcttttactcttcctctgccatcccatgaaagtgggccttttcctgtactaactcaagacaggtactgcgcccagggctgaaaagggagctgtctgcgttcttccctgctttttcaggagctcacggaagaggccatgctacccaccaggggcaaacaccaaagaagagaaaggggtctttgaagatgacaggaaggtaagaggacatgccttctgttgttctgaggaggaggtcagagtccaaagacagcaaggacacaacagggcttcacctgtgggttgtggggaggcctccggatgatggctcgtgcctcacctatgaaggcagggccctggggtgctgatttccagcctccacaaaggctgggcatggacgtgagagtgacctaacttaaagggacattccgggtttgggaaggagcatagctggggcgacttggatagccttaagggtcagaggcccctcatctcttttcgctgttggacgctaaagaaggcaggatggctggtggtaaagaatcgaatctgaagtcagccatgtgctgagggcaacaagatatggagcggaagcccatgcccttgtggacaacacgaggccgccatgacaccaatcagggccaacgctgggaagagaatcaacgtccactttgttttaggtgtcattttttctttcccgtttcaggtagtccattccaaccctaaatgatgaactctgtgaggctcagtttcctcttctgtaaactgcagacaatcctcatagcatccctgtgaaaatggaaaagctaagatgtccagtgtgcttggcacagttgctaacatgtcataaacaccccaaacgtgtcaggtattattattgttactgttgttgtcttgaataacatcgaatcaaaatatatgctgaaatcctatgagaaatataaagataaatagaaagaagcatagcactggtggtagatgataattgcatttttctgatttgataccatattttattcttagctcacttaatatatcaaagtcagaggagcctattgataaaattgatttaatagtaatatatcaaaccttgcagagataatgcttgtttttttctagtgcccatggaatatttacagtaataattacattcaccctctaaaagatctgaataaattctttaaaatgtaatgcctgtattgtctaattgccatacaaactatatataaataatagaatttaaatgagaaacttcttgaaatttaataaacccttctatgtatctcagtaaaaggtggcacacaactataaatatagactatttgtaaaataatgagacaacataagacaatgtatgagctgcagccaaagctgtacttattattacaataataatcttaaatatttttcatattgagcaagacaaaaataaatacactgaccattacattcaacaaatcagcaacaaaatggggaagcataagaaaagtgggaggaaggaattaacagaaataacaagaataaatatgcattcagcagaattgctataaatgagattggtttctctgaaatgacaaataaaatattcaaacccaagaaatctaatcaagaaaaaatgagaccaaaataggattgagaataaatatataatcacaaatacaaagaggatttatagacttttcagagatttctgtgaacaactctgctaaaaatggaaattgcataaaattgatcacattctgggaaaaatgcatttaaagcggcttatgaaaatctagaaaatacaaataaaccagagactcttaaaaaaataaaggattgtaaaagaactatgtgtttgtttctatgtgtatgtgtgtatcagttctataaggatgctgggaccagagggttttacaggcaaggtctatcaatcctctaaggaaaaggtaaattcactgtattttaactattatagagaactgaaaagttggaaaggttactctctctgtctctctctgtcacacacacacacagaaatttaaaatgaagagaatatattctgaaaaagaggaaatactgtattttggataacatataacttacctggaaaattcaacaaaatcaacagaaaaactgcttgaattaattagagagctaaggagagtggaatattaaataatgtaatataaaaataatcactattagagataaccagttgatacatttaatttagaaaattcctatttattacaacatccctaaacagagattgttcagaaataaattcaacaagaaatgtgcaggacctatatgtggaaaacaatcctacaaaattttacccagggctgcacaggtcaacactccaggacggacagggtggcaagtcctaggctcaaggacagagatgctgatatcggagcactgggttgtgatttgaagattcacgtgttgaatacaggtctttttcatgactgggtatctactcaaaggaaaagaaattgttctactattaataaaaagacactggcatgcacatgtttattgcaacactaatcacaatagcaaggacatgaaatcaacctatgtgtccattatgggtggattggataaaagaaagtgtggtacatatacatcatggaatactacacaaccataaagacaaatcaaataatgtcttttacagcaatttgtgtggagctggaggcaatgattctaggtgaagtaactcaggaatggaaaaccgaataccacatgttctcacttacaagtgggagctaaatattttgtccaaatggacataaagatgggaacaatagacactgaggaccccaaaaagggagcaggaagggaggagggaggggagcaagggcggaaaaactattgagtcccacgctcactacctgggcaatgggatcaatagaagcccaaatctcagaatcaggcaatacacccatgtacctaccacacatgcacatgtaccccctgaatctaaaatttataaaaagcaagaaaaaataaatataaatacaacctagacactattaaaaaaaaaaaaacaaaagaaagaaacatgtctttttttttttttttttttttttttttttttgttgagacagagtttcactcttgttgcccaggctggagtgcagtggcacgatctcggctcaccacaacctccgcctcccaggttcaaacgattctcctgtctcagcctcctgagtagctaggattacaggcatgctccaccaagcctggctaatttcatatttttagtagagacgaggttactccatgttggtcaggctggtctcgaacttccaacctcaggtgatccgcccaccttggcttcccaaagtgccgagattacaggcatgagccaccatgccctgccgaaaacatgtctttttcaagtctttgggagacttttaataaagagattagtgagaaatttccagaagcctggagagatgtaaatgaagtgaagctgatgaggaacgaccctgtgttgggaagaaaggtcctccctggtttagattagataccccacccccctccactgaggacctgagtaagcagggtcctgccttgatgggggcacacgtggtgaagctaggagagaaagcaagttctcttcctatgggggtatctgcacgtgcacacctcctttttccatgatcgccagcctgagaaggaccctgtctccaaccttcccactgtttacttccaacatggggagcttccttgacctcccagaagcaccatccgaggtctcagactctggaattaacttgcagctcaagagagcttactgactgcatgttgtacgtggggacctgcttcacagagggcgatgttgtcctgggcctctgtcccagaacctccagcttgacccttaggcttaaagttgttgttgtttttgttttctttcaatagcttttggggtacaagtggtttttggtcacatggatgccttctatactgatgaattctgaattttagtgcacccatcacctgaacagtgtatgttgtacccaatatgtagtcttttattactcaagcccctccaacttccccaactcccaagttcccaaagtccattatatcactgtatgactttgagtcctcatagcttagcttccacttgtaagtgaaaacatgtggtatttggttttccattcatgagttacttcatttagaataatggccttcagctccatccaagttgctgcaaaatacattattttattcctttttatagttgagtagtattccatggtgtatatctaccacattttctttatccactcattggttatcttagatctcagacctgaaactgtaaaaattctaaagataatgttggaaaaactcttctggacatccaggcaaaaaaattcgtaactaagaccccaaaagcaaatgcaacaaaaacaaaaataaataaatgggacctaatgaaactaaaaaacttctgcacagcagaagaaataataggcagagtaaacagacaaatcaggctgaaagataaaggagaaggcaggtggctttttcatttgccaagggtctcagaagacagtcggcccagttgattgacagtcagtccagttgattgacctcccactgtccacattaactgatttcctaggtaatttctaaatactcacctcacttttctacagactgggtttgctgggatcataccagggtggactaggaaagtttgagtcttcactctcatcagtttccttcctgaccccacccccaagccactttaaataaagataagatctaagtagaaaatcatgcactcgctatgaacacccagcttcaagagaagtgccctaaatgcctccggtagagaaaacctcagtgcgtcgtatgcttgtttccatatgcaaatgaaggcttcaccaacttccacccctctttgctgcctggcatatcgtgattggcagggctgtacttcctaccctccatatgcaaatacacctcatattcactaacgcacagttttaaccccaccccacaggtgggaggtcgcaaaagcaaaggatttttttttctagttcttgtcaatcaaccagccaagctagtttatttaattttatacactagctcaaagtcacagccagtgtctgaaaggcctgaggggtttctcagaggtatcctaatttcgtgcaaccagctcctgactttcatctgcaccaaggtgggcagtcaagatgaatgagtgaatagaaatatgacacaggaaggccctgaatagactcagtggtcaggagacattaatcttgacgtgtgtgatctactttcgcagaggagctgaagtcaccctttctgcccaccacacctcatttatttggttaatctcccataacttgggccttatgattaaccctgtaagtaagctctgctctggtgggtctttgcccctctgagtttccaaaatggcatagattattgaaatctctcctctgacccattcatagacatcagccttcacgccatctggggctgcccctctcctttgtgactttgaccttaaacagcccagtcctataaataccaccactgaggtcaatgccaggtgcaaagagcatgctttggtgtgcaatccctcagcacctagttggtgccaggccctgagggatgtgctgttgggagtgtagagatgatttatgctcagagaaaggagaccttcactctttaacctggcgaggcgtgttctgcaattgaggaatattcctcagaaggacggcaggtggaagcttgctgctggcttgtggaggcggaggtgattgagcagcctcgcttagcagacaggcatttgtcaggcgggaaaaacaagggtagagtggaatcacaagtccgatgtgatgacaactttagtgtgagggaaagagcatccagaaaggctgttttgagatgttaacctgggtcattcctctctcctaactgaataaggcacaaaaacagtagctgctgcatttaccattgtgcagaaatttcagatgcaacatcttatcattggttccatgattcttgatgccctcaaccacactgaggattttaaaaaaggttaagagaatggagacagggagagaatctgttagatggatttctctggaaaaagttggatatgggtcctacatccctccccacaacctcacctcaagacagaaaggaagtgcttcaaaagggttgcttggggaagttggtgtgtgccctgcagccaggaggacacgggtgcttgtggctgcctccacttgggagacccggaggtggctgatttgtcagcagaacaagagagagacagttttagcagccttgggacagcctgctccccagagttcacaggaatgcctcccactggctgtgcaggaatcaatgccttcttgcagggcacagccactcccacagagagactccctggggatgggccaccgggaactcagggactgaggccatggtgaagggcattacctacttcccggacaaatttttcaaagtgcaacccacaaaagcagccctcaagagcctgtgtcactttaaacaatctgccagtcaagtgagaatctcactaaactctccagtctccctctcccgtgctccaactgcccaggaccaagaaacattcgcttggaagtgggaaaagaggggagcatgaaggcaggcttccctggcttccccggcagcccatctgccagggagaggtcccagctgtgcaggtggtgctggtgaatgggagaagtcaaatttgtagagaaagttggaaactgactactacgtaagactggcttttaaaaccactcagttggcacttccatgagttcagactattgtaagaattttctattctcgagtgacttggaaagtcatggaggctcgtctaagtttgcactcaggagataaagaagaaataacccagcaagcaggcttacaggacagaaggaaggaagtattgcataccatgcctctgtttgtttcacacactggggacagcacttaggctttgaatgagtgggtctcaaaggccaggggttgcgggggtatgcacactttccatgggtgcctgtattagttcgtcttcacactgctgatgaagacatatccaagcctggataatttataaagaaaaagaggtctagtggacttacagttacacattgctggggaggcctcacaatcctggcagaaggcaaaaagcacatcttacatggtggcagacaagagggagtatgagagccaagtgaaaagggaaactcattataaaaccatcagatctcgtgagacttattcactacaatgagaacagtatgggggaacccgcccccatcattcaattatttcccactgggtctctcccacaacacgtgggaatcatgggagctacaattcaagatgagatttggggggagacacagccaaaccatatcagtgccccaaacttaatgattacaaaacctagaacactccaaggtgctaaagacacagttcatattactgtagaaagtgagataagtaaacttcacttccaaaccccctcctccagcattttactgcaagcaatggtagaaacatatagaaatggagaagtcatttttcaacattgttatgtagttttctaaattctaatgactgcataatagtctacttaaccaatctctgatggatggacattaggttacttccaatttttcaccattagaaacaacgctatgatgaatattcttatgcataaatctttgtggtttcctctgattatatcctgtggtgaaaacagaaaaagtggtactactgaactaaaggagggaaaaattgtaaggcttttgaacataacgctggtgtcccccaaaccttctaccaatttatattttcatactttcaccttagttctaagtttctactcaatggacaagaaatattttaaagtcttttctaatctgataaaagcttactggtaggtttttaatttgtattcctttgaaatctagtgagaataaattttcagccaggcacggtggctcacgcctataaatccaacactttgggaggctgaggcaggtggatcacttggggtcaggagttcgagaccaacctggccaacatggtgaaaccctatctctactaaaaacacaaacattagccaggcatggtggcatgcacctgcaatcccagctactcaggaggctgagtaaggagaatagcttaaacccgggaggcagaggctgccatgagccaagatcacgccactgcactgtagcctgagtgacagagcaagactccatctcaaaaaaaaaaaaaaaaaattctaggttaaccaaatgtatttcctcttttacaactttcctttgtagtttccttgttttattttatttcaattgaaaatgactgtatataattatgggatacaatgtgatattttgttacatgtatacactgtagaaagatcaaatcagcctaagtaacatatacatcacctgaaatatttatgaattttttctgtggtgagaaaatttaaaattttctattttagttatttacaagacattgttattaactatagtcagcttgctgtgcaatttatcaccagaacttattctttctacctaggtgaaactttagaacctttgaccaacatcttccctttccctacctgcctcacccccattccctggcaactaccattctactctctacttctacaagtttgaccttttcatttatttatttttatttttatttatttattttgagataggatctcactctgtcacccaggctggagtgcagtggtgtgatcttggctcactgcaacctccacctcccaggttcaagcgattactcctgcctcggcctcctgagtagagttacagacatgtgctaccatgcctggctaatttttgtatttttagtagagatggggtttcaccatgttgggccaggttggtctcgaactcctgacctcaagtgacccacacgcctcggcctcccaaagtgctgggattatagtcctgagccattgtacccggccaagtttgactttcttagattccacatataaatgagatcatgctgtatttgtctccctgtgcctggtttatatcacttagtgtaaagtcctctaggtttgtctatgtgtcgtttacaacttttcatgtattatctttcatttgtatatatttttgtgttctttatctttttcatatctgtttatatgttctttacataataaaggcattgactgcttgtcttatttgatgtaaatttcaactacagttagctgtttaccttttagtagtgatttttgatacttgggtcttttaaatagtatgtagcaaaatctataaatctttttctataagatttattctactaaggttttgtaacaacagagaaaaatgtctatgttataattttaggttaaaagacaaggtacaaatttatatttacagtatgattagagctatatcacacacacacacacacgtgcacacacacgcaccccaaattaaaaccaaagtcctaatagcaaaatcaagaagtctgtcaaaattcaacaatggcttaagttgatagttggccatgtagatattttttctttttatttctattttctacataacttctgtcttgtatatggagacacaaatattagaagtgaatcttattccacaaacccaagtgtgcaagaaatgtcaaaatgtttttattaaatcaagataaatctgacttgaattaccatctagcagggctgtcagcagattttagcccacctattttgtctcttctgtcccttttttaaaaaattaattttttaaaataaattttttaatttccataggttattggggaacaggtggtgtttggttacattagttaagttgtttagtggtgatttgtgagattttggtgcgcccatctccagagcagtatacactgcccccaatttgtagtcttttatcccaccccattcccaccctttccccgtgagtccccaaagtccactgtgtcattcttatgcctttgcatcctcatagcttagctcccacttatgagttagaacatacaatgtttggttttccattcctgagttacttcactagagtaatagtctccagtctcatccaggtcactgtgaatgcaattaattcattcctttttatggctgagtagtattccattgtgtgtgtgtgtgtgtttgtatatatatatatatgttcttatatatatattcttatatatatacatatacaaattcatagatatatatatggatatatacatatatgtatatgtacaatatatatgaatatatactatatattgtatatatattcaatacaatagatatacaatacaatagatatacaatacaatagatatacaatacaatatacaacatacaatgaatatatatacaataaaaatatatatgtgtatatacatacactatatatatacgtgtatatattccatcatatatatacatgtatatatatattccatcatatatatacatgtatatatatattccatcatatatatatacatgtatatatatattccatcatatatatatacatgtatatatatattccatcatatatatatacatgtatatatatattccatcatatatatatacatgtatatatatattccatcatatatatatacatgtatatatatattccatcatatatatatacatgtatatatatattccatcatatatatatacatgtatatatatattccatcatatatatatacatgtatatatatattccatcatatatatatacatgtatatatatattccatcatatatatatacatgtttgtatatatatattccatcatatatatatacatgtttgtatatatatattccatcatatatatatacatgtatatatattccatcatatatatatacatgtatatatattccatcatatatatatacaggtatatatattccatcatatatatatacatgtttgtatatatatatattccatcatatatatatacatgtttgtatatatatatattccatcatatatatatatacatgtttgtatatatatattccatcatatatatatacatgtttgtatatatatattccatcatatatatatacatgtttgtatatatatattccatcatatatatatacatgtttgtatatatatattccatcatatatatatacacgtgtatatatatattccatcatatatatatacatgtgtgtatatatatattccatcatatatatatacatgtgtatatatatattccatcatatatatatacatgtgtatatacatatatataccatcatgtatacacacacacacacacacacacacacacacacccctcagtttctttatccactcattgattgatggtcatttggtctggttccatgtttttgcaattgtgagttgaacactctaaaatcccaaaggttgagccaatagtcactaaacaggagctcatagtcttcagctgatcctgatcccagcccccaggcctcatccaaactctccaatccatgaggaaagacattcttccaatcctgacctgccacaggcaaaggagctttcccaagactcagagcccaggtacaggttcagcctgtttgtgccacactgacattctgttctgaggcctcagccccctgtggtcctgcttctgggctgcaaagctccaaccaccacccattcccatacgtcatcacacccctgcttctaacctgcctcaccctccacatcaaaaacacgtgtgtctctcctctctcccaaagaactcaggcctggggaaaacaaaagccaggaagggaggttgcctttaggaaaaacccaatgtgtctacagaaagaatttaaagatattgattcaaggtttcagtgagacaggaggagtaggttttagtgccgcatgatgaccacagttaatgttaaaatattattatttcaaaattgccaaaagagttttaacattcttgcaacaaaaaaagataaattggcaagatgatggatatattacttgacttgattggattgttctataatgtacacgtagatcaaaacatcacattgtaccccataagtatacacatttatatttaactgtgaattacatttgttttattttatttatccattttttattgtagagatgaggtctcgccatgttgcccaggctggtctcaaactctcagcctcaagtgatcctcccaccttggcctcccaaagggcggggattacagacatgagccaccatgcccagccaaaaattaattattttttatcaaataagaaatttaaacatctctttcctttaaatcaggatctgtggtgtttactcagctgacctgtgttctcttccataactgccctcttaatattcaatgctgcagtcccactccctaacatcttgctatggcttcaatgtgtcccccaacattcatgggttgaaaaccaaatctccattccaatagtgttgagaggcgggaactttaagagcagcttgggtcttgagggctctgccttcaaacccaatgctctctctctcctctgggtgtcctcagatactgttccctggcctggaatattcctcttccactgaattctctttgcctgatcacctgccatccccacctcaagtctcagcaaaaagccaccttcgcctggaagccttctctgtcccctcatgcctgggtgagtgccatttagagtcctcttcacctggtgttacatagcctgtttctgtatttacggccttcttcagactggaagctccatgaggcagggccatgtctgcagtgcagtgggcactcagtgaatgaaaaaatcaacagtgctcccctgcttttgccgtcctgtcccgaagccagcgtgctggtccctgggcaatgtagggagtgtgggagctctgctttgtacagctcatcactccagtcacttgatgtgggagattgtcatcagctgttgacatacctgacttgcccagctgatctgtgggccacttgagggataggatcatgtctcatttgtctttactttcttagtgctcagcttagtgcctggcacacaccacacacacatgagatttttttttttttttttttttttagttcttaaatccagcccatttctttggggcctgctgtggaagatgaaaatggaagttggcagctggaatggatctgtagacaggaaacctgggagatgacaactgccgtcctgggatgggagcagggtccagggaaggatcaggggctcatatcttccagatttcagctcttagcactcccgcagggctccatctctgacctactgaccggctcctaggaagggctctgccagttattccttttgctttcttcttgcacttcccacagccaaaccatgaaataacaggacctggactctgccagacatgcagacatctcctacccaactggagagctgaaacctgaatattgctcttggccccacttggaatgtctgctccgcagccggcctctcccaatacatacacatacgcacacacatgcatatacacacatgcatacatacatgcacacacatgcatacatataacacacacacacacacacatgcatgcacgcacacacacaggtgcatgcacacacacaggtgcatgcgcaggttcacctgtacacatcacccatatttacttgctcttcaccttttagtctaacacaaattactccaagagccttccctgaactacaacttcatcagcccttctactgatgtatgaacgctcagtgtgctggctggtttcttatttagtgctacatcccccactaggtacaaattcctgagttgcagaggttggctgtcatggtccctaccctgcccctgacgcttggcatagcatctggcacccagcaatgtaatgaataccactgagtgtggaatccctccacaaccatcacaagtaggaagccccagcggttttgagttaactcccagttcaccaaagccagtggccaccatccctactgtctgaagtttcaagccaagctcctcaagtgaggctgagtcaaaagatgttttctgctttgtgacctctcaggctgaaaatacttgagaggtcaagtattgagaaaaaaaggggaggggtggggttaagcagtttgagctctttacaaacaagatgcaagcaaacaaagcccaggccccaggtgaaagataaacataacatgttctataaatcacaattacaaaatattcatctgtcctccttaaaacacaatcccgcataagccattctgaaatatgtaaaatgttgcagcactgttggggaaatgcatgatctcagatttaagaagaaccattgaacccagtacaccccacttgcctttatcttttggtatttccagaaccagaggctccagtaaccctcattttccctcatgccaacaccctgcaaatctgtgtcaccccagatagactgtgggcccagcatttgcctcagctgcactagagagaggtttgccatcagtagcagttaggagattaaatgggtacagtagtctcagacatgggaaccacagagttaaaagttcagaaaagactatgataataaatgtgatagaaagttcaggcaatcccattactgtgcatatgcccaaaggaaaataaatcattctacgaaaaagacacctgcactcatatgttcatcacagcactattcacaaaagcaaagacatggtatcaacccactgcccatcaacagtggactggataaagaaaaggtggtccatatacatcatggaatacaatgcagcaataaaaaagagtgaaatcatgttttctgcagcaacacggatgcagctggaggccattatcctaagtgaattaaagcaggaacagaaaacagagtgtcacatgttctcaattataagtgggagctgaaccttgggtacacatggacataaacatgggagcagtagacactgggaactccaaaagaggggacggaagggaggagggcaaaggctgaaaaactttctattgggtcccatgctcactacctgggtgatgggatcaatcatatcccaaatctcagcatcacgcaatgtactcttgtaataaacctgcacatggacccttaaatgtaaaataaaattaaaagaaaaataaagaaagttcaggccttatatagatcttaactgaaacctaataataacatttgatttgaatatgaagagggagaaagcaaaagagataattattttgccttaaaacatgtgccggcaaacttttgtaaggggacaattagtgaatatttcagactgtgaccacatggcctttgccaaaactcacctctgccactatagcatgaaagcggtcaccaacagtgtgtaaacaaacgactatggctgagttccaatacaagcttacttacaaaaataggcagcgggccagatttggcccacaacccatagtttgctaacctctgtcttatagtagagtggaatagaatggaatggaatagaatagaatagaatagaatagaatagaagaatagaatagaatagttgtgtactcttcccaaatcaataaaagtttaacaacagtctaagaattgcatgtctatatacacatttactgacaaaatgattctgagtttcatttgaagagtaaaataagagtaaataaaaattttaaggaaataggagagacttgcagtaatagatattgaaatgcattataaagctatagcacttaaaacaacgtggaatggacagatcaatggataagaattgatatcccagaaacattccctagtgtatacaaacatttcatttatgataaaatcagcatctcatcaaaagaaaaagatagatttttcaattgataattactagataattaggaaaaagccattcaagtcttttttttaatctatccatcctattctatagcaagccaattttagattaagtagttaaatttcaaaagttacttgaaaatacaacagtgatcaggatgggaaagaactttcaaagcataaaattagggtaacatacaagaagtgaataaaactaacctcttcatctaaaaacacatcactatcataaacaataacaacaaaaaacaaatgaacagtgatttttaaaaacactatagataaggaattaattttctttctacttttaaaactacttagaaatcaatttaagaaaaaaatctatctacctgaaaacaaaatcaatgagtgatcctttctgagttgtggtaatactagcaatctttgtttttatgcttttctgtatttgtctatattttgcaatacaggtgtattacttttataagcataataaagaccaacaatattttaaagcaaacatttaccacaataggagtgggctggaggaagaggttgtgaaaaacatgagattctaaagaatattagtgcaaatggtaataaagacataaaaatgggcatagtcagaactaattaaagaaatgacaatgaaacaccaattttaatgtataaaagtggcagaatttttacaaaaacatataagattctctgtggggaatgtataaagaaattgtattatcatacatgcttgtcatcaagtaattggataaaacacttctggaaggcaatttggcaatatatataaagaaccttaaatatgtacataccctttagtctagtcccacttctaaaacttagtccttaaaagtgaattaggcaggtgcagataatttatgtacaagagggggataacacagaaggataggtgggatgagtgtcctcctgcatcggtccattcttgctttgctataaagtagtacctgaggctgggtagtatataaagaagaagtttattctggctcacaattctgcaggctgtatggaggcatggcaaacagcatctgccactgatgagaactcaggaagtctaaaatcatggtggaaggcaaaggaggagaaggcatgtcacatccaagagtgagagcaagaaggggaagtccaagactcttttaaatgatcagctcttgcataaactaccagagtgagaactcactcattaccatggggatggcactgaggcattcatgagggttccatcaatgtaacacaatcacctccaccaggccccacctccagcattggggattacatttaaaaatgagatttggaggagacacacatccaaaccatattatgatgcccttggccccccagttgacatgcctttctcgcattgcaaaatacaattgtcttttcctaacagtgccccaaagtcttaacttgttctagcattaagtccaaagtcctaagtctcatctgagactcaagtcaagttccatccacctgtgagcctgtgaaatcaaagacaagttatttacttccaaggtacgaaggtggcacgggcattggataaattcccattccaaaaggagaaataggtcaaaagaaagaggcaatagactccatgcaaatctaaaatccaccagggtagacattaaattttaaagctccaacataatctcctttgactccatgtcctgcatcttggtgctagaggtgggcacccaggccttgggcagctccacccttgtggctttgcagagtgcagcccacatggatgctctcgcaggttagagttgagagcctgcagattttccatgctgaaattgcaaactgctggtggttctaccattctcaggtctggagacttccttcccacagctccactcagcagtgccctggtaaggactctaaccctacatttcccctcaacactactgtagcagatgctttctgtgtggcctaagactctgaagcaggcctctgtgtgctttccaatatatcctctgaaatctgggtggaagctgccaagcctccttcactcttgcattctgtgtgcctgcaggcttaaaatcatatggaagcaggcaaggcttgctccctccaaaggtgtggcctaagctgttatctgcagccctttgagccaaagctggagctggagcagccagggagcagtatcctgaggctgcacaggagcagcagggccccaggcctggccctgaaagcattctttcctcctagacctctgggcctgtgaggggagggcctgtctttaagatttctgaaatgcttttaagacctttccccatgttcttgaatattagaacctatcatttttttggccatgcaaatggctaagttgttctcttagcctacttggatttctctcctgaaaatgctctttccttctctactacatggctagggagcaaatttcaaaatttttatgctctgcttccctttcaaatataagttccaactttaagtcatccctttgctcctatatctgttcataggttgttagaagcagccatgccacatcttgaatgctttggtgcttagaaatttcttccaccagataccctagatcatcactcttaagtgcaaacttccacaatgacctaggatgtgatcatgatgcaaccaaactctttgctaaggtgtaacaagaatgatctttgctccaattcccagtaagttcctcatttccatcagagacctttccatcctggccttcattgtccatatttctagtggcattttggtcgcaaccacttaacaagtctctaagaagtttcaaactttccctcatcttcctgtcttcttctgaggccttcaaactctttcaaccttgtatgagtctgttttcacactgctgataaagacataactgagactgggcaatttaaaaaaaagaaagaggtttaatgggcttacagttccacatgactagggaggactcataatcatggaggaaggcaagaaggaacaaatcacaacttacatggatgacagcagacgaagagagagcttgtgcagggaaactctgctttttaaaactatcaaatctggtgagacttattcactaccacaagaacagcatgggaaatacctgctcccatgattcagttacctcccacttggtccttcccacaacatgtgagaattcaagatgagattttcgtgaggacacagccaaaccatatcattctgcccctggcctctcccaaatctcacgtcctcacatttcaaaaccagtcatgccttctcaacagtcccccaaagtcttaatttgcttcagcattaactcaaatgtccaaagtccaaagtctcatccaaaacaggcaagtcccttttgcctatgagcctgcaaaatccaaagcaagttagctacttcctggatacaatgggggtacaggcattgggtaaatacagccattccaaatgggagaaattggccaaaaccaaggggctacatgccccatgcaagtcagaaatccagtggggcagtcaaatcttaaagctccaaaatgatctcctctgactccatgtctcacaccaaggtcatgctgatgcaagaggtgagtactcatgctcttgaacagctcctcccctgtggctttgcagggtacagcctccctcctggctgttttcatgggctgccattgagtgtctgtggcttttctaggtgcctggtgcaagctgtcaatggatctaccattctggggtctggaggatggtagccctcttctcacagctccactaggtggagcccgagtagggactctgtgtaggggctctgatcccgtatttcccttctgcactgccctagcagaggttcttcatgagggccctgcccctgcagcaaacttctgcctggacatccaggcatttctacacatcctctgaaatctaggtggaggttcccaaacctcaattcttgacttttgtgcacctggagtctctataccacttgggaactcccaaggcttggggctttcaccctctgaagccatggcctgagctgtagcttgacctgtttctgtcatagctaaacagcttggatacaaggcgaaaagtccctagactgcacacagcagggggatcttaggcctggcccacaataccatttttccctcctaaacctgtgatgggaggcaccactgcaaaggtctctgacatgccttggaaacatttttcccattgacttggtgattaacattgggctccttgctacttatgcaaatttctgcagctggcttgaatttcttctcagaaaatgggatttgcattatcaggcctattgcattgtcaggctgcaaattttccaaacgttcatgctctgcttactttatgaaactggattcctttaacagcactccagtcacctcttgaatgctatgttgcttagaaatttcttctgccagataccctaaatcatctctctcaagttcaaagttccacagatctctagggcaggggaaaaatgctgccagtctctttgctaaaatataaaaagagtcatctttgctccagttcccagcaagttcctcatctccatctgagatcacctcagcctggatttcattgtccatgtcattatcaccattttggtcttcttctgaaccctccaaactgttccaacctttgcctgttacgtagttccaaagtcacgtccatattttcaggtatcttttcagcagtgccccactcccagcaccaatttactgtattagtcaattttcatgctgctgataaagacatacttgagactaggcaatttacaaaagaaagaggtttaatagacttaccgttccaagtggctggtgaagcctcacaatcatggtggaaggcaaggagaaacaaatcacgtcttacatggatggcagcaggcagagagagcttgtgcagggaaactgccccttatagaaccatcagatctcctgagacttattcactatcacaagaatagcacaggaaagacctgcccccataattcaattacctgtcactgggtccctcccacaacacatgttgtgtttgggtggggacacagccaaaccatatcaaacctcttcccattaccacattttcaggtatctttacagcaacaccccactccttggtaacaattttctatattagtctgtttgcatggctataaaggaatacccaaggctgggtaatttgtaaagaaaagaggtttattttggatcacaattctgcaggctgtacaagcatggcactagcatctgctcctggtgaggcttcaggaagcatccaattgtggtggaaggtgaaaggggagcaggaacatcacatggcagcagtttgagcaagagagagaggcagggaggttccagattattttaaacaaccagatctcatgtgaactaccagagcaagaactcattcacgaccatgggagggcaccaagctgttcatgaggtaatccaccccactgacccaaacacttcctaccaggcccctcctgcaacattggtggtcacaacatttcttttctttcttatttctttttttttagtttttttttctttttcttttttttctttctttttttttttttttttgagatagggtctcattttatcacttgggctggcatacacatacagtggagcaatcatggttcactgcagccttgaccttctcctgggcttagttgatcctcccacctcagcctcccaagtagctgggactaatggcatgcaccaccacatgcagctaaattttttatttctatttttgtattttcagtagagacggagtttccccatcttgcccaggctggtctcaaactcctgggctcaagcgatccacccacctcagcctcccaaagtgctatgattacaggccggagccactgcatctggctggaggtcacatttcaacatgagatttgtagggcacaaaacatccaaaccacatcacctctctgagcttaccatcagtgggaagctgaccccacttctggcactgcataatttcttttccatttgtgacaaattattggtttcagcctggaccctgacaccaagaatgtcctcaactctcagcctgcacttgataagcaccttacacaagtttctggaaaagttgctgctcaagatgggccagccacatctctgatgcctgattactcttatccctgaaaggttctcatctttctccttccctaaatgggctgagtctggtgtcaagggggtggtgttttgtgtcaaaagacctggaggtcttagcctatgttctgcacagcgtgatcttgggcagaccacttcttctctaactcgacaagcatgtactgaccacctgccatgtgctgggctctgtgccagggtatatactggtgaacaaggcacctgggatgaaacttgcacacttgttttttttttatctttaaaaaataatgagaatgtgcttatcctccacccttaatgtgcttaacccttccaccttcagctattgcaaggcaaaacaaagacagtatatgtgaatctgctgtacagtcaatgaagttctacaaccctgcaaaacattttctttagggtactccaagttatgctatgagcactgtagataacaaggccatgaaatctctttctccgctgtgccttgacaaagatcagcaaagtatcctggaaggtcctaatcatcctagagcaagactggatgaggtgggattcttattctgggtcacatagtggtggatattgatgaagatttttctgatacagctcagttgcaaaggcaaaaatccaagagtcattctagaaagttctctcttgaccaacccttccccatcaccatattcaaactgccaccaagctctgttatttcccactttcctccagatcatttcagaatgctgtgtaaaattgtttgaaatctttcttttgctcttaggataaagacccactgtctacaggcagaaatgagccaatccctcctatttaacatcatatctaatacttctgtcttccagcctccctgacctcaaatgcaccaaggcctcctgccccagggcctctgcacagtatgcttttgttgcctccttcctcatcccctttccttacatattccttttgtctccttccaattttatatgtggcctctgaaacatcagttcctcagcaaacttatccccaagccccaaatttggataagattcttctcttgacaccccatacagttcataaaactttttttgtttgtttgtttttgagacaagggtctcactctgtcccctaggagtgcagggttgtgatcacggctcactgcagcctcaaattcctgggctcagatgacccgcctacctcagcctccagagtagctaggactacaggcgtgtactaccaagctcatctaggttttctttttttttggtagaggctgggtcttactatgttgcccagactgcacacaacttttctatcctaagctaagcttgtcccagtttgtaagataacttgattatatgtccctattgtgagatatttgatttcagactctttgtctgtttcttcgttttttatttttatttttttgagacagacttttgctcttgttgcccaggctggagtgcagtggcacaatctcagctcactgcaacctccgcctcccgggttcaagtaattctcctgcctcagactccagagtagctgggattaaaggcatgcaccaccacgcccagttaatttttttgtatttttagtagagacagggtttcaccatgttggccaggctggtctcaaactcctgacctcaggtgatccacccaccttagcctcccaaagtgctgggattactggcgcgaaccactgcacctggcatgtttcttctttcaaaggtaagctccctgagggtagattcctattgaatagacgaatgaacaagtggagaggaaagagcttgaccatctgcactggaggtgaaagctaaaccctggaacatcaaaccgatggccacactgaaatgacagccaggaaaccgggccttcccacgggccagcatgggacgcctcatgtccatgatctgaccacctcctgcacatggacatagagcagggaacaccatgagcagcaggggagattttaaggaggaagtagaaaataaaagaggacctcaatccccatgcctgtgagacatgagggctctgttgccctgtggattctgttttatgcttccttttctgccttttcttcttgtcctgtgcttttccttctctagtaaagcgctctgtattctaaacgtggtaataaaccaagtggccttgtctgctctcatctttaaccagaaatataatctcctcgttaacctttggggggaggtctggctctgcccctcaagggtcagaggccagaatatttgggcatgcccgtggccttagcttccttggtcagcctgagttaatgggagatcagcatgtggggcagagctctcatttgctgggggtggagggggcacagtcattaatggtttctatggcaaaacactctgggtcttttgcatttgagagcattgctacttatttatttatgtatttatttatggtttagagacagagactcactctgttgcccaggctggggtgcagtggtacaatcgtagctcactgaagacttaaactcctgggctcaagtgattctcccacttcagtctcctgagtagctgggttacaagcgcacaccaccatgcctggatcattctttttattttttcttttgtagagacaaggtctgggtatattgcccaggctcctgggtatattgccagaggtctcgaactcctgacctctagcaattccctcaccttggcctccagaaattctgggattataggcatgagccactgcacctggtgggagcattgttatttaaaagtttgtggatattcttcctgtgactagtgtggaatcccgaggccccaggaaattcagacttatgtttcatgatggggagggtctaactccttatattattccttctgatcgtactcacccaatggggagaaataaaatgaaaagaataccaggtgagccacttcatctgctatcattttggcaacaagaaatggaagctgaccgggctcaatggctcatgcctgtaatcccagctctttgggaggttgaggtgggaggatgcttgagcccaggagttggacaccagcttgggcaacatggctaaacctcatctctttaaaaaaagtataaaaattgggcaggtgtggtggtgtgcacctgtagtcccagctactctggaggctgaggtcggaggatcagttgagtctgggaggtcaaggctgccgtgaacaattattgtaccattgcactccagcctgggtgacagagccagaccctgtctcaaaataaatgaataaaaagtgggagctatttctgcagcatccacagcaaacagagatggacttactcccttaaatctgagctgagttggccaaattctcactgcgtaagttggtctaatgccagcaacatttcctggatatgagagttttcagagctcttagaaggggttgggccaagcatggcggctcatgcctataatcccagcactttgggaggccgaggtgggcggatcacctgaggtcaggagttcaagaacagcttggccaacatggtgaaaccccatctctactaaaaatacaaaaattagccgggcatggcagcaggtgcctgtaatcccagctactcaggaggctgaggcaggagaattgctagaacctgggaggcagaggctgcagtgagccaagatgtctccactgtactccagcttgggcaacaaagcgagactctgtctcactttttaaaaaaaaagaaaaagtgggtgggggaggttggagccatgggtgtctgactctccctgggatgatttacatatattatctcatttaatcttcacagcaagcctttgaggcaggcagcatgagtcagctgaggctcaaagagataaagccacccacccaagatagggcagctggtaagtgagatgccacctacaccctcagtcctacttactcggaagtccatgtacgctgatgtttgctgttaccacactctgtggttctgccactaccatccttgtgaaactcgtgaaagctgcagacatgccacagctcagccttcccaattataaaaggagaataaaaaatatctccaagaggatggagttttctagagctccttcttccatctagttgatgacccttagaaaatgcttagtaaaatgagaaagcatttttaataggaaaaggtcaaatgaagaaatcttctagatgacaccataaagctttaaaaaccctttcgacttctgttctaagcccttcttcccggtactcaggccaagagaatcccgtcttggcatggctgcctctgaaccatttttgcagagagtcaggcattcattcattctttccctgaatgtttcctgagcagttctgaccaaagcacaggggagtcagccactattcctgccctccagttgctccttggcttgcatcttaatcttctgggctgctataacaaaatagcacacatgggatggtttttaaacaacagaaacttgtagcttccacggttgaaggctagaagttcaagatcaaggtgctggcagacttggtgtcgggggaggtcccgcttcttggttcatagaaggtgacttctatgtgttctcagatagtggaagaaaacaacagtggtttcttccatcacttataaagacaggaatcccattcatagcactccaccctcctgacctaatcacctcccctgccctgcccacttcctaacaccatcacatgggggattaggtttcaacacatgaattttggagaggcacaatgattcaatccctaacatttaacacataagtcttgcaagtagcttgagggtgtaggaagcaagtgctttgggagctcagagcagtgtacctggcctggcttgactggacatgcagcttatcttagaagaccatgcgtgatggaagttctcaggtgttcactcttgaggttgcaccctaggctctctcagatgctcccctgcaagccactgttccccaattctctgcaagggttcacctctggccttcaggacaaagtggagacttgggcacccttgggcaatgggaccccttcaggtggacagataaggtttatacccagtctgtggggccaggtcgggatcatggcatgactgtgggcatctcggtgtgccagggtgtctctccagcactaggggacccaggattgccactgttaggtatctggtagttcagctcaacacacatgatattttagcttcttgaatttttcttattggaccttagaggcagaggacctggttaattatgctccttggttcaagacactttattatggtgggtcaagtctaggccctctgttttgttttgtttttttcttatacaacttttattttagaatcacagggtccacgtgcaggtctgttacacgattgcacaatgcacgatgctgaggtttgggatatgcttgatcctgttactcaggtagtgagcatggtgcccaataggcaggttttcagccctggcccctcttcctccctcccctgccttatagtgtctattgttcccatttttatttccccatgtatacccaacattgaactcccacttataagtgagaacatgctgtatttggttttctgtttctgcattagtttgcttagaataatggcttccagctgcatccatgttgctgcaaaggacatgatttcattctttttttttgtggctgtgtagtgttccatggtgtatatatagcacatttctttatctgatccacagttgataggcgcctgggttgattccatgtttttgctattgtgaacagccctgtaatgaagatacgggtgcatttttggtagaatgatttgttttcctttgggtctatacctaatagtgtgattgctgggttgaatggtagttcaattcttagttctttgagaaatctgtaaactgcttttcacagtggctgcactaatttccattatgtctgatctctgttgtttttatttttaactctccccccactttaaattttacacaataaagttggaagacatttacattgatcacctgtatacctaccacctaggtcctaccttagcacattattatagtttaaaaagatcatttttagtagagacggggtttcatcatgttggccaggctggtcttgaactcctgatctcaggtgattcccccacctcggcctcccaaagtgctgggattacaggcatggcaggtgcctgtaatcccagctactcgggaggctaaggcagcagaattgcttgaacccaggaggcagaggttgcagtgagccaagatcgcaccactggactccagcctgggcaacaagagtgaaactccatctcaaaaaaaaaaaaatatgtctatctatccattgatctgaacttctatatgctgatgaatctatttttcaaatgcatatcaaggtaaattgcagatatcagtagacttacctgccaagacttgagtatttacttcaatattttagtgctttttctcctttgttgtaaagtttacataaaaatgaatatacaaatattaagtgcactaattatgagtgttgacaatatgtacaccattacaaccctaacctctatcaagatgtagaacattatcttcttctagaaagttccctgaagcccctttctgacccatcctccacccaactccacagaggcatgcactactccaggtttttccctttatagattagttttgcctgccctgaatctttacctatatagaatcatagatcttacaatcttttgggtagggcttcttttactcagcagaaagttttcaagcatcatttgtgtgctgtaggtatcaatagtttgttcttttttgttgctgagaagtattccattatacaaatatgctagaatttgtttatccattttttaggccatttccaccatttgaataaaactgatgtgagcatttaggtacaagtcttgatgtaatcttatgttttcatttcttcctaattaatacttaggaggggaattgtcatgtcactggctaggtatgcttttagttttataagaaaatgccaagacttttgccaaaatgaatgtactattttatcttcccaccaacaatataggaaggttctcaccggccccacatctttgcccatattaggtgttgttgaactgaatgtgaagcattctgccaggtgataaggggtgtcccattgcagttttaacacgcatttcactattagctaatgatgttgagtgccgtttctcgtacttgttggccatccctttatcttgttttgtgaagtgtttgtttaaatattttgctttcatttctttaatttggttatttgtccttttattattgaaatgtgggatcctttatatgtcctccatagtagcactttgtgagacatgttttacttctatttttcccagtctgtgtcttgtcttttattttcatagtggcttcttttgatgagcagcattttataattttgaagaagtgtaaattatcatgcttttctttctttcttcttcttttttttttttttctgagacgagtttcgctcttgtcacccaggctggagtacaatggcgcgatttctgctcactgcaacctccgcctcctgggttcaagcaattttcgggtctcagcctcccaagtagttggggttacaggcatgcgccactatatgcctcgctaatttttgtatttttggtacagatggggtttcgccatattggccatgctggtctcaaactcctgacctcaggtgatctgcctgcctcagcctcccaagtgctgggattacatgcgtgagccactgcccctggcctatcatgccttttttttttttttatggccactgtgtgctgtgcccctatccaaaatcttgtgcctactattggttcacaaggagattctgttttcttcttaaagctttatgatttagcttgaatatttaagtctatcgtccatcttatattgtggaaaaactttttttccctattatactagtcctcacttatccatgaaagagatgttcccagatccgcagcagatgcctgaaaccacagagagttccaaaccctacgtaccctgtgttttgtcttatacacacatatctatgataaagtttaatttataaattaggcataataagagatgaacaataataactaaaaatgaaatagggcaggctaagcatggtggctcatgcctgtaatcccagcactttgggaagctgaggtgggtggagggtgaatcatctgaggtcaggagtttgagactagcctggccaacatggtgaaatgccatgtctactaaaaatacaaaaattagctgggcgtggtggcatatatctgtaatcccagctacttggaaggctgaggcaggaggatcacttgaatccaggaggcagaggttgcagtaagccgagattacacaattgcacttcagcctgggcgacaagagcaaaactccatctcaacgttattcaagtgccatttgttgggaaaaaaaaaagaatgaaataggacaattagacaatacgctgcaatcacagtcgtgtgcatgccgttttgctctctaaataacttactgtactgcactcagccttcttcttgtgatgacatgggatgataaaaggcctatgtgatgagattccatgaccgtcaatctgataactgagacagctactgagtgactagtggtgggcggcacctacagcatggatatgcaggacaaggggatgacgtccatcctccgtgggacagagccggcggtgccggatttcatcgcactatgctgaactcccagcaacttaatacttatggatggtttgtttctgaaactttttttttttgagacagagttttgctcttattgcccgcactcgagtgcatgcaatggcacaatctcagctcacagcaacctctgcctcccggtttcaagtgattctcctacctcagtcccccaagtagctgggattacaggtgcctgccaccatgcctggctaatttttttttattttttagtagagacgggctttcaccatgttggccaggctggtcttgaactcctgacctcaggtgatccacctgcctcggcctcccaaagtgtgggattacaggcataagccaccacgcctggcctgaaactttctatttagtatttttggaccaagattgaccacaggtaatggacaccgtggagaatgaaaccatggatgagagggtgcaactgtgctgttttaaaaattgaatgaatgcctgtgtgagtccatttcttggttcctcctcttctttttaaaaagtatggcttcttttgtcttttccttctccattcccatgtcctgtcctcaaacatgagatgccatttgtaatgtgttgaaactattcatttattttgtaaatgttcttggaaaagatgaatttttgttttgtgtataagtgtctttatacaactgatattgcactatacatcttatggtgttaactgttgacctattaaaataagatatatatgatatctacatgtctttatctatatctagctatcgattgactgatctattgatcagttgatctatctcttttaatgagccattaacattgccatgagctaacactttctttctttctttttttttttttgaaacaggatcttgttctatcacccggactggagtgcagttgcatgatctcagttcgttgcaacccctgtctcctgggttcaagctattctcctgtctcagcctcccaagtgcctgggattacaagcacataccatgatgctcagctaatttttgtatatttggtagagatgggatttcaccatgttggtcaggctggtctggaactcctggcctcaagtgatcagcctgccttgtcatcccaaagttctgggattacaggtgtgagccacagcaccaacctgagctaacagtcttgtgtcagggtaatgctgttttgtgtatcatgtctcaactctctaatatctcagtggtggacatctgctcacctccaactttgtactaccaaaatcaatactgcagtaacatggccagaaatatcctgtggacctgaatgagaatcccttttgaggtagaaacccaggggcagagatcctgggtaatagaatatagaagacagcattttctaaaaatgatgaccatacctatcccatcctcacacactttctagaatgtgaggttgacactcttcattgagaggtgaagttcccattctcttttcttgatcctgggttgcagccagttgaaacggtgctacataatgctgaggctaggtcattgaaatatcatgcacctttttctggatctgtggggcccctcactcttgggacatagtccccatgctgagtggcagccaagcagccacaagatgaagtcacctggaagaatcccggccaacagcctcaactaggttgctagctgatggccagcaagcaagtgccaggcatgagagtgagtttctggtggttccagcccccagctatcaagtcaccccccagcctttgagctaccctggccacaaggagcagagataagctttccctattaagcactgcccagtttgaagactaatgagcagagtaataattgattttttaaagccactgagtatacggtggcttgctatgcagcaaaagagagctggaacgtatgaattcagggtatgaatctccaagaaatattagaggcggcccctttgcagggcttcagattctattctcccaacatcagtgccccaggcccctctgccctcatgtctctgctgtttacttagcattgcctcttactaattttgcctaatagttgccaagtaacagctcatccattaaaattgtgtttttctgattactaacgattttgaacacttcttcgcatgcttctaagctttttgggttttcccttctgagaaatgcttgttcatacgtttcccccatatttatattaggctgctgtctttctgtttgttttgcaggaggtccttctctagccttgatattagtcccttgtcagtttcagtcgttgtaaatatctttttgcattcagttacctgcctttgacagttgcttcctagccacagcagacaaacgacagaatgagagattccatggagaaagagcccccatctgtgccgtcattgtcctaagctctttaaagcagttctcaacaacattttctcacatttttgtacaatgccctgccgtctaacaatatatgcatatttatgaatttaattattaaaacaaccccaaaagatagctattgccactctccctgtattttgtagcttggtaaatgaaagcctagctagctgaagtgacctgcccaaggtcacacaatttttacatgttgtcagaaaatatttaccatcagctccattcttcccacggtccaacagagctgagggctgagggcagagaaaggacttccatcagatcaggtgataattcagtcccttaggagaggtgaagactgctgagtggacccaagcgattcagccttggagccaggggtctggagacaaggcctacctgtattaccagctccatgtttgggtgaaacatttctcccgtctaggcctaaatttcccaatccagaaaacaagctcaattgtcataatgacaatgacctcccaaatgaatcacgaaagttaaaagaagtaatataaactgtgaagtatttttacccaaaaagtctaaggaattagttcacctggacaaaaaccctgggttggagtagctatgtcagggtttcaggcttagctcaggtcctgaaaagctgtgtggccctgggaaaactccttcacctctctgggctgcagggtgcttattggtctaaggaggcccttacacacatctctacaggcccttccagcctagagattcaagctgaacctgagctagggtcagaggcggttcccagggaaagagcaggggggtgtgtgtgtgtgtgtgcgtgtgtgtgtaagtgtgcatgtctgacttgtgcatgtataagtacacctctgagttcacatgtgcatttgagcctgtgtaagcaggtgcatatatgtgcatatatgtgcatatgtgaggctatgcttgtgtttcggagcatgcatgtgtgtgtgtgtgtgtgtgtatgtatatatttgtatatatctatgcatgtaagcatatgtgtttgtatgtgaagagagtgctgtatcttgaaaaaaatgtttttgagaattaatagatgtgcatcttttccttgaatttcctggattataccccaaggccctttcttcccacacaatgagaaaggtgtggtttgctgttctggggactgggcggtggtgacagaaggcagatagtagggacgggtgtcatggaagcatccagatgggtgtgcactcttgcttccttgggttttcaagccctcctttctctgcagagtcccaggttgggctggtggaagaggcaggaaccaggaggacaggacaaacagggctgagaacagaagtgcctgagcatggggagccaacctggagagcctggccttcttggcctcttcctaccctctgatgagcaccagcgcctagcagcagcccacaacagacactcacaggtgtgttggggctgtgtgtgctgggggtggggtctctgctgctcggctcacggtgttggggaggactgactttgctgcatgggaaagggcagggataaggagcagggctgccccagtccagccggatccaggctctgatggacatggcagccctcactccttctcctccagccctgtggggtgcagctgttggcctcttcctgctgcaccacttccagagccacctgggcctggcagtttgtcaccactaaaagcctcatatcctggctccccctgcactattaatctcagaaaaacgcattgtcaaacctaatgaaaaaggggaagccaccaaggagaaggtgtccacacctcgggctgacagttgtcaggcaggcgggcagcagcgtcctgctggggacagagctggatgaacagaagcagtggaaagtgcctggggagatgggcacggggactcaggaccccgtgcacggggtgagcttgtgcttgccaacagcagaggagggaggaccaaggacaggaggcctggggcctggagggacactgtcagggacatggggcagcactcccaaagagaagtaccacctgaccaggactcccagaaaaggaagcccctggcagctgccagctgtgtccccagccctgtcctatcctctaagaccaagcaaagggggaaggactgagctccaatcagaggccatcaacggaaaggcctcaggcctcacctggcccattgaaaggtttcacttggtctgttgagtgttgaaattgttttcaatgatataaaatttttaattgggatagcctatgtaaagagcgagatttgcaatttctcttgaaaaatgaaaaaaaaaactgaccatttttggtttgggggtgtgatgagctgtagctgcagggtcgtgactggtgggcatgggcttgccggccgccctggccgcagcactcctggcggctggccacatcccttgccactcactgcggcagccgtggaagtcttcgttattcatagatgccaagaatcttcagtgtcctgcagctgcgtatgaatttctctttctgctctccctcagccatgtgttggtgctgtgggacaagccagggttttgctagcatgaaaatcaaaggcagtatattttagccttcccatcacagaccctctcctgtccccttctcattccgggactggttctctctcttattcagccaccattgcagttcacagccctccctccaaaggctcctatgaacccagagatcataagtcaatctccccctggacccaccacaccccttgtagattgcccaggctgaagactgataatttggagctctttcaacaggcagtgcattctgttggcaagtgggttctgagcatctcctgccattgtgtgcccagatgggggaacaaggggaaagacagcacctgtcacatcacaggcccaaggctgccagagagtgaccaaacccagagaggtaacatatgtgtgacagatgagtgtggagcaggctggagtcaatcaggagggcttcctgcaggaggaggagcttaagctggctagtgagtgagtggaacagggtgaagagcttgcttgctggagcaggctaggcctgagctccaggatttgatctttttgggtatagctatgtgctgttgggtgtggcatttaggatctctagacctcagcctcagtatctaaaatgggaatggttctagtgtctacaccctttccagcctcaagtactgcaaggctcagcctctgtctttctggagtggtttggtcatgtttgctggagtgagtccctcctgggcttccttagggctggtcccatctgctctgtgtaccgggactcaggataagccacatgggaggtgaccaagaatcactttttatttggccaaagatgggggaggcattgtagggattactgcaggagccaaggtcactgccaagtagatgagatggagaacaaacccacgaggtgttcgctgcaagttgaaaagtgaaatacttggcctaagcggtttcataacattcctcctatctctctatgccccccaagccctttcctacatttgggagggatggctgtggtgactggggaaaaagaactagagagttctaccagttgtctatcagacaagagcctatgatagactgagggaagctgggcagaaaataagctaagggtcacattgtttcccaagctcaatgagaattggcaaagctgcattataatttcagaagtatgtgtatggtataagataactgttggcctcattgttaacctggaatccttggcctctgggaaggatggtgtcttcttatgccctctccttcaactctcaggatgagaaactacaattctgagtggaaggaagggcatcccttagttcatggggccagtgggaggctttcttcctgtggggcctctttgagccttccagatggttggaagtggccctttatccttgtgggaataagggtgagaccgagggaaaagacaccgttagtgcctggctagattttaggatggcacccactgcagatcaccttctggaggtctgggacacccaccgcagatcaccttctgcagatctggggcgtccacagtagatcaccctctgcaggtccaggacacccaccgcagatcaccttctacagattgggggcacccacccgcagatcaccctctgcaggtctggggcgctcactgcagatcactctctgcatgtccagggcacccaccaaagatcaccttctacagatctggggcattcaccctagatcaccctctgcgggtccggggcattcaacgcagatcacccaccgcagatcaccctctggcagatcaccctctgcaggtcgagggcgttcacagcagaccaccctctgcaggtccggggcacccactgcagatcacgccctggaggtcttggcagtttgtgagcacaagcacatgcattttcgtatcctgaggagaattcactggtgtcatcccagcttctccgagtctgccctttccatggatgcagagaaattttccatttcagtgaccttctccacctatatttcatgactcgtgtgccaccctctcctcggagctttgagctgagaccacatttccacccccggcatcccaccgtgcctccactccaagctctctgcacctgccaggtgagacagggctgatcagaagatgctgtgatgagataaatcactttcccctcatcgccctgaggactctcgtagcctcctgttctgtgagatgtcttctagacagtgaattttccccgaggccctgggagcaggagcaccctgccccttggggatctcattggctcctcttcaggtgattcctatgaggtggcttccatgtttggtgctggtccacactggagggccaggccctatcttatcggtatttgtgaccctccgagtgccagttgagatctggcacagaagcactcaatgactgtttgcaaagaaaatgtgtgagttgcagagattcccttagacctatgctacaagcctgttcagagaatgagcatttgcaggagataataagtgggagaagatgagactgtgacccgcggagagctcatcagcactttggcaaacttgggtctccacatacggctcagctaggctgtgatttacctactcatgtgtctcagtcactctactagggctgggaggcagagagagaaaaggcaggagggaagggagggagggaggggaggaggaaagggggcaaggaggaagggggaaataaaagacttattttgcataatagagatggagagcattggtgggggggtggtgggtatgaaactcatacttttgtaaacacacaaagagagaaaaataataggtgtgcaggtaggtttgctattctgttcatcactgcccctctaatgtcgacagccagccctaaagtccaaatgccccacctggggtagcctgcaggaatccgtcctgtgctgcaatccctacaggagcccggggacagtacactggtgaaagccatccgatgtgtcttatttttagcagcagggaaatgtggacacctctgggtcaaccctgggattcaaatcatgtaacccaggtctcaaattctctcttgctcttctcttcacctatgtggactctagagttacaaatccctcctggacagtggaggtggagtgtggccagctgtcattttgacaggtcttccttgctgttgtcctcggctgttcaggtgacccccagatgcatgtggctgactgtgcgtggcctgtgtagaccagggcaccttggtagtttccttagtaacctgagcatgctgagaaggcatggttttcatgtgggccaggtaggggacagccacttcaactcaccaggtaaatggcagtgggacagggcactggcctgaccacactcaggaaaacctcacagagcacagaagaagagtgatgcatacaccatctccatacagcctgagggaccgcatcgccctgtgtctgcagcgacacggactgttggatcttcagtcaattcagaagacatcaacccatcagtctgtcatttaccatcattttttctttctttctttccttttctttttttttttttgagacagaatctcactctgttgcccaggctggagtgcagtgccacaatctctgctcactgcatcctctgcttcccaggttcaagggattcccctgtcttagcctcccaagtagctggaactactggaactacaggtgcccgccaccatgccctgctaatatttgcatttttagtacagacagggtttcaccatgttggccagacttctctcaaactcctgacctcaggtgatccgcccaccttcacctcccaaagtgctgagattacaggcatgagccactgtgccaggctcatctaccatcatttaaacaaaaactcatgtgcctccttctaactctaggtctgttcaggagcaaatgccactggatgtacgttggatcccactgtacatctagggccatgacttccacaccttggcatacctcggcatcacctgtagggctgcggccccagccctgagggctcctgaccgaggaggtctggggtgaggcctgagaacctgcatgtttaacaaggtcctaggtgacaccgatgctgctggtctgaggacagcactcaccatagtcagagaaccgtggtccaccggaaaagtgtgaatcctcggccaggctggatttatccaggattttacttctcctcctgcttttcttccttttctagagtccggccgggaggactgcgggcagctgggacagaagtgtttggaggtaacacgttgtatgtgttttccttgttctcctgccctgctcacctcgactcccttccacagctgtaggctcgctcctctgctgtgggctttcctctgttcctcagtcaccctctgaatgagggcaccctttcaggtgatgacacagacactccacagacatctgccggctgcccagtctccaaatgccctgcagagatgtgactggaagagtttggggcaattccaagggagtccgttgagagaatcatcccagttggttggaggagggcaaagaggtaagactgagaggagacgctctgtaagatgagcacgcaagagtatgccagggcagagcgggcacaggagagcaagcaggagtgggggacagggacgtgtgctatcttcccaggcagctagagcccaaagccatgcacaaagggaaaatcaccaagaggcaaaatgaccactgaacaatctcccaggatctgccaagtcaatatttttgtcattgttgttgttgtttgacacagggtcttgctctgtcactcaagctggagtgcagtggtgccatcatagctcaatgcaaccttcaccttccaggtcaagcgatccactcatctcagcctcctgagtagttgggactacagacacacaccactacgcttggctaatttttttcttttgttttgtaacacaaggtctcactttgttgctcaggctggtctcaaaccactgggctcaagtgatacccccacctcgaactcccaaagtgctgggattacaggtgtgagccagcgtacccagccccaagttaagactgaggaagctttcagtgacgcctccactcaggcccactccgagacatagattctgtccaccccagtggaccgggggcagaatctgtgctacttcattgtcattgtaagcttttgtttgttatttttagacttactttctttcatgtgagttatgtggatggttgaatcctcatgatttcttcttgcacaggatatagcatccccgatttcacctttggagcggtgatcatatagtttattgcacaaatcagacattttttttttcttttaacaaagttaagatcacaaaattttataccttgctttttacatgttataggatataaacacttcccgtttgactgaagtatctacttaatcaaaaagactgatgcttgtgtaatattccattttatgagtgtatcataatttatttcatcatttccacattgttgaacattcagtctttattcttctacttgtcattgtcatttttatgtaaggaggacatctttgtgtgcacatctttgtggtcattatggattgtttccttaaaagaaattcctggaaaagcattattaggtgaataaaatgactgtcttttaatcccaaatagggtaatagtacctccttcctcaacttactaaagaagaaaaaatcaagaagtcgtgaaactgggtcctgtcaacatcttactccaggaacctctagcaagagcacagccatgccccccggaagaggtggaagaccctgcttcctctccatctacacagtcttctccctacagccatgccccccaggaagaggtggaagaccctgcttcctctccatctacacagtcttctccctacagccatgccccccaggaagaggtggaagaccctgcttcctctccatctacacagtcttctccctacagccatgccccccaggaagaggtggaagaccctgcttcctctccatctacacagtcttctccctacagccatgccccccaggaagaggtggaagaccctgcttcctctccatctacacagtcttctccctacagccatgccccccaggaagaggtggaagaccctgcttcctctccatctacacagtcttctccctacagccatgccccccaggaagaggtggaagaccctgcttcctctccatctacacagtcttctccctacagccatgccccccggaagaggtggaagaccctgcttcctctccatctacacagtcttctccctgggagctagatagaaaatgctgatgtaatcggcattcagacctccaaaacaaaattaaaagactggccaggaaaaaaaaagaaaaaaacttctgtgtcttcagacactaaggcagccttcaaaagccttctgagcacagatggctgagaggtcagagaacgggaaacccagggtccctccgtgctaatgctggtgcccggtcttggaagatctgggtctcctgccagcttccctcctcacctgtcccagagtcagaaggtgaacatctttaagcctaatggggtgaatgcttactatactaggagctcatttgtaacataagggccctactacaatcccactcctcatgcaaaattgccaatttatggcaatattccttgtttagaaaacaaggctatccaaacactataattacaacgtgcaccagaagccgagagttccctacattaatgcacaggctccagatacattcgtcaaatagagttttttttttttttttttctctttgccttcttctctgggtacttttaagttcagggacagagaacatgtcttcattagaaacattaacattcacaggctgtagtaaattttgacagtgaaaaggtctctgtaacctttagttgtgcagaaatttacttcccaagaaaattacatctggcactgtcttaattaatgctagctttcttttctgaaaattgtgggcttgtcagtaaaaaaggcagaaaaacctgaatttaaaaggctggacacaaaagacgccgagaaataaagctctgtgagatttcataatattgctctgtttttgttctacagtaagaagatgaaaagatctcatttgattttgccaaatgcagcaacatacatgtaatgtagaattgatttgcattttctctcttttgtctctgagttttatcatgtaaagtgtgcttgggaaggtattctattttaaaagcaataggtcaaataaaatccatacctacgaggaaaaaaaaataatgtatgacttcatttttttagcctttctctaactgctagtattaatcgcagctaacaggaagaaccgtggctgttttcgcaagtgaattttgattatctgacattctctctcccggtttaaaatgggttctaagtatgatgggagagcttggcttcacgtccggatatttctattttgcatggcttggacgtctattttgaaaataagatgctttggctttctttggggtttagagattaccctaggtttattttttttcttctctattcaactttgcattttgatgatctagcattacctttctccagtttgagaaaggagcctcaaatacatggtcctaagtcattctttctaacgtgtgttttgtgtcatgtgacatgaaacttttttttttttaatttactttaacttccaggatacatgtgcagaatgtgcacgtttattacttagatatacatgtgccatggtggtttgctgcacctatcaacccctcatctaggttttaagccctgcatgcattagctatttgtcctaatgctctccctctccttatcccccagcccccagacaggccctggtgtgtgttgttccctttcctgtgtcgacatattctcattgttcaactcctatttataagtgagaacatgcggtgcttggttttctgttcccgtgttagtttgctggggatgatggtttccagcttcatccatgtccctatgaaggacacaatcaccttcctttttatggctgcatagtattccatggtctatatgtaccacattttctttatccagtctatcattgatgggcatttgggttggttccaagtctttgttattgtaaatggtgctgcagtaaacatacgtgtgcatgtgtctttacagtagagtgatttatattcctttgagtatatacccagtaacatgcttttaaaaatgtcttagttttgctatgtgtacaggaggctggagaactagaaggtgcgtggtcttggagaagctctgtagccatcaaggccaccctggggccaggcagggtggctcatgcctgtaatcctagcactttgggaggccgaggcaggtgaattacctgaggtcaggagttcgagacaagcccggccaacatggcgaaaccccatctctactaaaaatacaaaaattagccaggcttggcggcaggtgcctgtaatcccagttactggggaagctgaggcaggagaatctcttgaacccgggaggtggagattgcaggcaagattgtgccattgcattccagcctgcgtgacacagcgagactttgtgtcaaaaaacagacaaacaaacaaataaacccaccctggattctgatgatgggagagagaaagggtgacttgtccaaagtcacattgcagagctggactcagctcccagactcctgggtcctgtcctcaccactccacaataccctctacaacagcacacaggaaggaggactctcacctgttcctcctgcattgtgaagcctaagaaaacagcgatgggatcattgattttgatttggggccagtacctccaaaaatgtggggcagtcctgccttggaaactcgaggggattttaatggtatccagccagcatggtgtccagctagggcctgcttgggcactttctgtcctcccaaagtcagggaaggaggctgtctttggctccagccagcatatcttgaatgtctctgtgacactggctggccaccccttttaatagaaagagaaggacttaggcttcatcaagccttcatactgagctgaaatttaattacatagtttgtttccattatgttctttttaatggttatttcatatttatggtaagtgctattacttttctattcatagtaataatataaaacttcttttaaaaattaaatccatttaagtaaaaaagaatgaatataaattaaataaaaatattaagtaaaagagagtaccaatggctccccgggtgtggtcaagaatgcgagggtgctagaggaaagcttaaggttcaagttgggcagaagttgctttagaggacagagaggagcaggtggaggggacccccacctgctcctctggactcccgggtgggatatgtcttcctcaatgttccaggagctttttacatgaaggtacccattatacataatttacgtgtgttgatcaaatgatgagtgggcgcctctcgctcatttaataactcaccgtggaggctgttggagagacgcccctcgtctccatgcttaacagactctcctgctgctccatgacagctggataggaggcaatattttaagataaaaggattattaaaatagtgcatgtgctgtgttcacactcccatgtgcttcctctttctctgagttgttgtcgagtgccatgtaatttaataaattataacatatttataaataacaccttaggttaatgttgtcatgcatttttcacaacttagcattgtacacagaacgagtgggaaagtcgggggagaaggggtccaaaatgcaaagagaaaggagggtgctcacagcgtcaggtgggagtgggcttcccccctaaagacaacagcttgttcagggtcgctcatgtgcagagggtggcctacgggtccatcaggggctgagggatatgcttggggcctgtggaagagctttggaggctgcggaaatatggggtctggggtgagtctatggggagtccatagggaccactgggggtccttggtggtcagtgtgggtccatatggggagtggtaggagggatcagagtccagatctagactctgcctgaacctcctgcaagcctttcaccccctctctccctctccaacccagggcctcagttttcccacaaggagcttaagcaagaggctcctgtccttattctaggattctagtttcccacaggagacagaaccattagcaggtggctgtattatgtttagatgtctcagacttgtccggggctgtaggagtgtgtgggggcagtgggagtgtgttcagggctacgggggtccatggctttgggaaggggctcagggcagacagtgtccaggcaggctgcctgcagctgaactgaccatctacctcttcatatcctacctgcctggcttttaactgctcaggaaattaaacactgtccatttgaaaaattagagataaaaccataagagagaaaatcaaaagatctgagatgagccaattcctcctcatgcgagacttggctccaagggtcctgggagtgaagacaaaagagaaacttgagactaccactccccacgctctagcacatgtgcagagcactcggcaatcttgtggaaatgtggattgtgattcgggagacctgcgcaggtgtatgagggtggaaccacactttgagaagtgactttggacaatctggtgctcagagcctgcaaaaggaagccagcaaagccacaggcagagatgagctttgcactggagattaagcagctcaaatccatgccctggaccaccaggcacccaggcccaaagggctgattttcacaaaagtttggggctcagacagtgcaaagccaaatggaaagatgccacccaggagggatcatagtccaggtctagactgcctgagcctcctgtaagcttttcaccctctctctccctctcccacccagggcctcggttttcccacgaggagcttaggcaagaggctcctgtcactattctaggattctagtttcccgtaagagatagaaccattagcaggtgactgtattatgtttagatgtctcagacttggtgtgaattgggactcctgtcccaaattaccttcctcgcctccagccaagttgcccgaaatgctatcattagtgcatcattcctttgaggacaaataggcttatcacaaaatgtcactgcacacagggaggtggcaagcccaggcttctccgagtagaccatcttctctcacagccgggtaggggatgagtgaggctgcctggggagagagggctggcttcagaggcacacagtgacttgtcccccaggctgtctccatgagcagggcacacaggaaggctcaggtgagctctgatgtgcaaagataaaggtgtccagctccttcgtggcccagagacaatgttgcttttctaggaaaacccaagtctgagagaagccaagccttgggaaggtggtctcagctgcagcatccgggagtcccatagactgtgggcatgcgttttccaagcagtgtcctcttgtccctaggcagaggttgttctttctcgatagctgttccaagagtgctatcctggggcttcctaaccactccagaccctctgtccagccaccaggtgcagagagggtactgggaataggagacacccaccttgtactcatgaggggccttgactgggtccctggactaggagagctcccttccttcctgggcatccccagagggctgttgggtcgatgttcaacatggagcagagagctccagagatgctcccaggaattaggtatctctggaagccagagcctggaaagccccctctagaacgcacggaccagatgtccctttttgtctatttaatttattttattttatttttgacttttaagttcaggggtacatgtgcaggtttgctacataggtgaacttgtgttgtgggggtttgttgtacggattattttgtcacccagatattaagcctagtacccattagttgtttttcctgatcccttccctcctcccacaccccacccttcaataagctccagtgtgtgttgttctcctctatgtgtccacgtgttctcatcatttagcttccacttataagtgagaacatgcagtgtttggttttctgttcctgtgttactttgctacgaataatggcctccagttccatccatgtccctgcaaaagacatgatctcattctttttatgactgcatagctttccatggtgtatatgtaccacattttctttatccagtctaccatggatgggtatttaggttgattccatgctgtggctattggaccaaaggtttctaagtgggaaatccggggcctcaaagggctgctggatgaactagaagggggattgtgagcccacaacagtgacatgaaatatgtgcacctatgcatttccatcctcgtgacattctcaaaaaggcttttgatgctaaaatatcaaacaataaataaaacaggacaaaacacccttcatttgcagacttgcctagggttcaaggggtaaggctctttggaatgtttttctccaaaccagcttcactcctaaggctcttttttgacatgtaatgtctcagaagagaaaaggcaaatcagtttcttcctgggaaactcaggcttcctgagtgagcaatcaaatccctacgcactgagctagccctcgcattctagctgctgggccctgtccaaaccctggtgaagagggcacctgggactccttcccatagggaaggtctggtccagctttctaggtggccagccaggccacagaatacctttctttgccgctgcggcatctatcccgtggttcaacagtttccttgtgttacaagtcctagggcggccctctcccccccacgcaccgtgccggcatggtctggatgcttgcacacaccgtgcacgtcatttctgccctgtgctgagctgtgcagagagccggaggggaacaatatattaccacgttctttgcctaacaattggtaacacatgacacttgtatttgccccaagataatgtacaaatatgttttacagggtttcctaatgataatcatgatatttcattcttcttgcccttctaataatgataacagtctagcattattattttttttaactgttctcagcgagtgtgacattcagttcagagaatcgaatgtcagcaagaaatctgtatgcactccctgaagctgggagaagccccttccgtttatttttaggttgcaggagaatgaagtgatctcaccttattcttttttttccccccttagaaaggtgtttggcattcagcacctctctgatgtttatgaagtctggtctgaggtgtaggcattctaggtcttttcgaaagctgtcctaatgagaaggtgggggcttgatcaacattgcgtgggggccatggagggagagagttcctcccttagaagaaaagtttctttcaaagtgggctttgtatattgaatgaggaatggcttgggcccctcagcaaaagacccaactaattagtaggtaaagcagccacttcaaggctccttgtagacactaggtagaaacacctaattttttttcccagctacttcactgttcttcagggtgcatttgacatgccaatgtgttttttcatccttgtcctccaccattagggagcgttatcttcagggttaaatacccaacaaatagcatatatatatacactattataataataatagtgtgtgtatacatatacatatatatatatatatatatatacatatacacacactattattaaccagtagcagttctaggcatgctgaaaactacatttgagctgttcaccagaaactatgcataagagatgaagattgatcaaaacctagaaaaagaaaatagagagccagcaatgataaaattaatatgatagaggcttaagttaggatagcatttgttgcctctctcctctaagttcttagttttaaactgatgcttcattgttccaattatctaagctattttgacttattgggtttttttccctctttttcttttctttcttttttttttttttttgtagtggccaaatgaccaaaagtgtcctatttttggccaagaagtggtgagattctagcacacactaagccctttatggctggctggctgacagagcaggaaatggtggcggccataggtaggacattacactgaagccaggcctgggatccgattatttagggaggcaagtatttttgttgatgagcgaaatgaaatcctctgacagcaaaatcaatcttctgcagagaccccagagcattgatcctggtgcacattgacaggctcaggctgtttagccatttggaatgaccacaaaaaatgagcaagttgttaagagttttagagttttggtatttattggcaaccggtgcactcatatgattaatcacacattcgaaatgtgtgtgccatggaaattgactgcaacgcagcagaaacaaagttttcagttatcctcgtataataaattgaagctatatccctaagcagaattgtcttcaagattccaatttgccttgttaaaagtgttgtttatagagtagttagcaaaaacgcaagtaattacgtgcagaattcattctaagcaattctttattttcccccgttctgtattggttttccatcttcattacccagtattttggtccatctcagcagaaacctgactggtgagatggcggccaggacggcggccttgatggctttggccatgcgcagagtgcatgtggtcacaggcatcagtgtgtgggactcgaacaggcggggctccaagactccagctccggggccgtgttgacagggacaaggcaggaacggcttcggtgctatatttcatttcataaaacaatatttacttctggagaagacgcctctttatttatttatttagttcgttttgagcaggagcacagtttggtatacacgtcgcggtggagcaagccacatctgttttggttgcgcaaccagcaggacttcatttcacaaatatcatccgagtcaagaatacagcttttggaatgcaaattatgtttaagtgagtaaacattgcagcgactgtgtacccccctaaacccccccagcataggaggggatagggcagcaggcagtgggtgcaggctgtttgcagagacccccagtcagggtccctgtggagggtgggcagcctggaagggctcccactggggaggggagagaatgagcgcagtgcctagaggggaagcccactccgcaaagccctgcttcccagaggctcctgcttgctctccccggaacagagacctcatccatatctatcaggagaggcctaattatagagctcggagattttaatggcacagggaaatttaaatgcggtggaaaatatgaatattcctaagccagcagtcaaaatacgaaatgattggcttccgaatcaatgaattataatttcacagtgtattctccaaggtggagtctctctcccttcccaggaagagttttgtgcaggcagacgtgttttaataaactgtacttcagtattttgttcagcagaaccttgcctccctccagccccggatgctgcagccttcgtcagtgctcggtccccccaaacagattgcaggggacaacaggaacaatcacagcatcctgggggccagcagggggccagtacctgacaggcacacttgagccgcagccctggcttcccgggtgcctgcaggaagcgtatcagggtgtcaaaagtaggggaccaggatatttgtctaaaacaatctggctcctgctcatgcacccaaatcccccatctcaaagccacaatgcctttgtaactgaagccttttccagctggagcagccagtgggtccccgacgcgggacacacccttctcagcctcaggcactgagtgactcccttcctccggctcctatatctttacctgtggaggagataaggatgtgccccagctgctgtccatgcaaccctcaaactggagagtcatgccataaatcctgttttattttatggacaaataaatgctgaggtaaaatattccaggatcgtcgcttgaatacttgccatagcagcggtactgtaataaccaccgtgacattaatttactgcattgtgccgtgggaagaaggaagaaggagggagaggggcattaaaagagaaaaatgactttccttcgaatttattgggattggcctccctcattttcagccatcattagttgattaggccctgatgacagtgtggacaatcgtgccggaatagttggcggagagacgccctaaaggtactctgttaattgagatgatgttcatcttgtacttactgaacataactgcagaccgtggaattggtggttagtgtggtggaaccaagcaggggggccgggctgtggccagaggccgcgggctggggtgggagcacctgctgctaccccctccccaccagaccacggcatccacccagagccctggtcactccatctctattctgagcactgccgatgaacctgtcaagagaggataaagcaagcttcccttttatcccaggagcgctcctgagctgctgctgcacagagaccaccaggaagatcccccccataatcgccggctttgaggactgactgcagtctgaagggtatcattccgagacccgcaagccagagctgagaccaggctcctcttcttcccagcctcgatgctgtagacagtcattcctaacgggaatacagacgcaacttccatccgcatcaatggctggggcttgtccacaaggagatcccagccggggcagagcgaaggcctctccaccctgggatggagacccagtttcgtgtccacaagctccattggcagcggccttggccgcgtatcccgagcaaggagggtagctccacttcgtgatctttgcttaaacattttcagaggccaacactcgctgtctgtccccagggctagagaattgcctgctaaaggtatttaggaaagaaaatggaatctgacatgtttgagtgatttagtaagggccacataccttccgaggtgcttgacatccattatcccacttaatctcctcctaccctatttatcgtcatttagggtcagggaatcgaagctcagagaaatgagcaggcccagtgccccatggcctgcaggagcctggaacagggaagtaagtaggcaggggaggtctctgcttcctgagagacagtggttgcagaagctctaggatcagactccctgagctggaatctggctgtgcttctctcttgctctgtgatcttggacattgcttcctgtctctcagcctctatttaatcgtttctaaaacaaaaataagtacacaagaccatgatgtgggctcggtatttgtgagtaattttgattgctgtagtcgttgtggttaagggaccatcagcagttatccttcttggaatcccggtacctaggagggggaaggagcacaggattgctccagcctcagtcatgtgaaaagggagtgcctcccacaccctccccacagcccaccacgcctgtcatgtctagacaaccagacagatgctcgggcctgaagggtgacaaatccactcacaagatacagcttgctaagtggcagtggccttttattctctgacatctttccagacccttgaagggattagaactggattagtttgagatgagcctggctctgccgttatcacctgtttataggataatgacattatctagtttggcccgtaagggcctccatacgtaggagcttcgttctctttgatctggagggtcgcagacaacatatctttaaatctaaacaaactcactgaagcccaagataagtgttcaaaatacccagtgagaagaaaggagcctctcttttcccttcctgcccaatgcaaagagcaattttaaaattgtgtgcactcacacgattttaaaacctaaaactcatcctgccactttggaccctagcttccttgcgtctcctttcacgtgtgcacagaattctgaagtttgtagagctttttcaacccatctcaacttatatggtgagcacagccgtctgagcagagcagggtgagctcaatacacatgatacaggctgggacacaaaacacaaggctcagggaagacaaggagtttggcaaccctcatgtcttttttaagagaggagctgtggttaaacccagctcatctggaaaaacccagcactcatttcactgcctgaagccatctatgaaccgacctctctgcccagacagctttctttaaagaggatcctcattacccttcacagaaaacatctgtttagacagatgttccaggaggtccttggcccaagtccactttcttgtcccaaggcttccctaacgtccatcatccctgtttaaaaattatttttattgaagtataatttacatgcaatataggcaatctgctttaagtgtactgaccttttgttaagttttggaaaatgtgtacctttgtggaaatgatgcaggacaggaaagacccaaaactagggcttagcctgggaagtttcttggttttgcccaggaaagaattcaagggggagccggtggtattagacagcagcttctattgaaaaggccatgcacagcagcagagggactgctccttgcaaagcagggccaccctacagactgtgtgcctggacatgcagctcagaggcacctctgcagacatatttatacccacttttaattacatgcaaattaagtggcagattatgcagaaatttctaggaaaagggtggcaacttccaggtcactgggtcattgccatggaaaggggcagggtgttgccatggagtgtggccatggcaatggcaaactgacatggcacaatggtaggcatgtctcaaggaaagctgcttccactccacccctgtttcagctatttctcaatttggtccagtgttcaagcccaacctttggagtcgagtcccacctcctacctcagaaccaccaccataatcaggatttagaatgcatcaccccaaaatgtttcttcatgtccctggccccttgctttcaatctcctacagctcctagtgagtattgatagttcagtcactatagtttttctttttctagaaattcgcctaagtggaattatataatatgtaccagcttctttcttatatctggcttcttttacttggcatgctgtttttgagagttaggcattttgttgtgtgtttgattagtttgatttttgtagtgtgtttgatttgctgtgtgtttttctttatattgcagagtagtattccaccgtatgtatataccataaaatgatttatcgatgctccagttttagacatgcaagtagtttccagcttaaggccattctgaataacgctgctatggacatttaggtacaagtttttgtgttaatatgttctcacttatcttggacaaatatctaggagtgagattttggcccatatgataaatagatatttacattataagaaactttctattttttaaagtggctgtattcctgccagtaatgtttaacattccaattgctccacatcctcaccaacacttggtattgtcagtctttctaattttaccattcttgtgtatgtacagtagtgtcttgttgtggtagtatttgcatttccttagaaactaatgatgttgagcatttgttcatgtccttaattgacattcataatattttctttggtgaaaggccagttcaaatcttttgcccatttagattgattatcttcttatatttgagttgtgccagttccttatatattctgggtgtatctcctttttcagatatttctagcaaatatattctcatagtttgtggcttttcattttcttagacatgtctttcaaagactaaaagttctaattttgataagtcatttattcattttttcttttatggtttgtgttttttgtgtcttatgtaagcaatttttacttaggccaagatcacagggttttcttttctattttcctctagaagtgttaatttttatgtataatgtgagctaagaaatgaggtttatattttccatgtgcatatattgttatttcagcatgttacacctctcaatgtatataagtcttttctattttatctcagtaataatttgtagttttcagaatatgcctctcacattgtttattttattcctattaatatttttcatactattataaaaggtattttaaaactttgctttataaaaatttgttgtacatttttatttttattccttttttaatttttaattttgtgggtacataataggtgtgtttatttatggagtacatgagatattttgatataggcatgcagtttgtaataatcacgtcacagaaaatggggtatccattccctcaagtatttatcctttgtgttacaaacaacccacttatactcttttagttatttttaaatgtagaatcaaattattatttactgtagtcacactgttgtgctatcaaatactaggtctttttcattgtttctgactaattttttacacattaatgatccccactctcccatgttgtatatttttatgtctagtccatatattctgtttcattgctaaattgacttattaattctatcttattttatagatttcttggatttcctccatagattatcgtattatctgtatgtcttttatttgtttttcttgacttactgtcctatatgggacctccactgtaaattttaatcaaagtggtgaaagcagacttccttgcctttttcccagtcgtaggggaagatttaatctttcatcattaaataggaacttagctgtaggtttgtcatagatactcttaatctagttgaagaagttctctatattcttagtttgctaacagtttttattcatgaattgctgctcaattttgtccaatgctttttcagtatctatgattgcaattagttcctgctatgctatttaaaatcttgcaagaaaaacctcagtgcttatggaaaaattggggtgacaggcaccacactaaaaacctttatcagtgacacacacaagaaaagaaaagatgagaacctaataaaaatggtaccactgttttccacatattactacatagctgatttcagctcagtgcagttttttgcattcatctagttttccttgatagcaaaattgtgcataagcaaacacaaagttcaaattgttcttaacacgtgaattgcattgaaacaaattcacatttcaaaacaagtgttacagcagaatttattgtaaaagtttgtgttttttagtttattaataaggtaaattgcaatgattaacttttgaatgttaaactagtctgccatttgttggataagcccatttagtcatgatatattattatatttgtatttttctggatttaatttgttaaaatttgttaggggtttttggatgaatatttataaggcgtgttaatgtgtagttctgttttatagtaatgtcttcttgttattttcatatcagattaaggctggctgtgtaaaatgattgaggatatatttcttctcctatagtttctggagcgtttgtatagaactggtattgtttattctataaataaacaatagaattcatcattcaagtaaactaggcctgagattttctttgtcaaaagttttcaaatgatgaattccatttctttaatagataaaagcctattccggttatttgctccttcttaagtatgcttcgataatttgtatctctcaagaaatttgacaatttcttacaagttattgaatttactgacacgaagttatttctcatatctccttattatcctttcaaggtctgtgggatatgaagtgatgtctgttctttaactcctaatattggtaattgctgtgttcctttttccccttcttttttattatttagtctttttaaattttcttcatttattgatactttgaagaaccaaattttgtttccatagatttactcaattatctgttttctattttattaatgtccagtctttataatgttctttctttctgctcactttgggtttcagttgctcttcgttttctagtttcttcaagtaaaaattcaatcattgagtttagttttttcttcttttctaatgtaagcttttaaatataacaaatttccttaattatcactttatctacaacccacacattttgattttttaaaattcagttcatactatttccaggccataatgttgttttatttttcctgtgatttcttttttcactcatggatttttagaagtatgtttttaaatttcaaatgtttgtggtttttccagatacctttctgttattgatttctaggttatttccagtatggtcagagaatatacttcttatttttcaattttttaaaaatttatttaaacttattttatgacctagaatatgagctaccttagtgaatgacccatatagacttgaaaaaatgtgcattctactcttttaggattttctctaaatgtccctaaatgtcactcagttttggttgattgacagtggtgttctggggaacgtttaactgaatatctggaaagaaaaagtcctgatacatagtatttgataccttctgtggatatgcattcttatcaatgctgattttaagctaacaatgtgctgtcaccacattgtgctgtcacaaatgaaattgctttcactagccagtgcaagctagttctagcacaccacagtgattgtggtattcaaatcttctgtatctttgttgcattttgtctgtatattctttcagttactgagagatgaatgttgtaatcttgaacaatgatcactgatttttccatttctcttttcagttctttcagtttttgttttaatgtaatttaaagctttatgaagtgtacatgcatttagcatttacgtgtgttataacttcttgataaattgatccctttatccttatgaaatgtacttcattatcactggtaactttcttttctttgaaatatatttctctgatactaatatagctacccccaccttacctttgattagtgtttatatggtgtagaatttttcattcttttacttaaaattttttgaataattttggatttacagaggaatgcaaagatagtactgagattctctgcataactgtcactcatctgtccctaatgttaacatcttaaacaactatggcagatttgtcaacattaagaaattaacattggtgcattattaggaactaaagcacattttttacctggatttccccaggtttgctactagtttcctttcatgttccaggagtctatccaagagtccacatttgtatttcgttattgtgtcaccttagtctcctctggtccatgaagatttctcagtctttttattgtttgtcattgcctttatgcatctaaaatgtactagccaggtattttgtagactgtttctcaattcgggtttgtctgacatattctcatgtttatactgggattatagaatgtgaagtgtcctcattacatcttttaggggcagaaatgataaaaatgacactattactgatgttaactttgatcatttggttaagtctgccaggtctcttcactgtaaagttactatttttttttccatactgtattcattgaaagtgagtcaccaagttcccagaattaaagaattaagttatacttcctagaggggagagagtatttatatgtaaagttatagagttataggtatgtgtgtgtatatacacatacacatacacatacacacacacacacctataattttatatttaaatatacatatataaatatatatactgtacatgtatatacacataatgtttattgtataaaattattcaaacatttgtcccttttcccaaccccttgcttatttgtaatttctttctctaacagtgagaaacttggcttcctttatttataaattactagtttttatatgtaaagtagttttataattgctaaatatatccctgtgagaaacacatttactacctaaggtactgtgtttatatatagttttttttgttgttgtttttatttaggtcagcccctttttttcttcatcccagtggtgatattttgtcatattttaataaagttagattcatttgtcaaggtctacattccatcctgggatctttcaatatcctggttgacttcttaaagaatatcacatactgtaaagttttctttgtagtgtacagttatgttgattttgagataaaaaagcagtaccatctatctaccacccaagaaccatacagaatagcttcatccattctaaacattttcttctctgtcttgttatagtcaacacctccccactccctaacccctggcaatccctgatacgttttctgtacccataattttgtcttttctataatattatataaatagaatcagaaaataagtaaactttgtgtctgacttctttcatttagcaaaatgcacttaagatttattcattttgtgtaaagcaatagcccatttctttttattgctgagtagggttattccattggatagctatactacagtttgtttattcacttatctgttgaagaacatgtcggcattctttttcttttgtcctctctgtgccgtgtatttaaagtgcatttcttttagacaagtcgtgtttttatatccaagctgactttttttaatcaaaatatttagaccatttacatttagtgtaatttttaatatgattaagtttatcatcttgctatttgttttttaattttcccatttgttctttttatctgtcttcttttggattagttattttttaactacattttatttccactaccattttgtattttagttttctaaagtttacaacatgtattttttaacttaccaatttactttcaaataatatcatgccacttaacatactttataagaatcttagaacagtatacttgcatatctttccttactttttgcaattgttcttatatgtttaattacttttattattaacttttaatgtgaagttccaaactaagaaaatggcctctaaccataaagaacaggatcaaatcctggctttcttactcactcactatgtaatcttaggcaaatcactttacatgtttgttcctcagtgtcatggtaaagttgtctgtaaaataacaagcttgatatgaagaaaaagtaaaataagccatgacatagttgccacaccatagctggcacacatgaagcaaagggatacagtatcccttctaggccaaacaccagaaaaagtttgtcgggagtggagagctaaaagtgaacagtttcccatctctgagcacactcattccttgctactcatagtctggccctctgtgacaccaggaaacaacagcagatgccaaaatgaaccacagcagcaaactaagggtgcccatctgtgtcaacaccagcagacataactgattctattccaagaaggaaattaaactaaaaatcagttgtactttatgtgagctccccaaatcacaaagactaggttactaaggaaacttgcttctgcaaacttcaagtgttgaacttaagtggtgagtggttttgtctgcagacaccatgtaggatgcctgctggagattgggggcttcagagctaccttattttcttacttcctggcccagctggctgcctcttctcctgagctgctagctttcttctggagggatggataggctaacgcacttgtgaagtaagctctgggttcagacacacctggatgtaaatcatggcccataattcattaatcataaccctgcagaagccacttagccccaccaaccctcagtttcctaatctataaaatgggaataaaaatgaaacttaatgagataatgcattttagctaagaagagtagtgggataatattctaaaatattagccaatcttccctgctcttcctctctttcatttatccctcagttcattttgttctatctcttaggccctgggcagaatagagcagcagaaagcaggcaaagaaaggagtcttttctgactgtagatttccagaagcctaggccctagggcaggggcaagtctcagaggacagattcaggagagagagatgatgatgaagggccaggagtgtgggctgtcagattggaaaccagtctgagttaaatctgggaggaatgaaggaagggaaacagaagggtgagggctttgtttccaggccaagtgcaaagaggcagcacagccccaatcagttttgtgggatccaccaaatggctgtagaaggaaagggagagaagaaagggcccaattgcctgggccagcctctgagttacactggctgggtagtatgtccatgcacacaggctccaggtcagagggaagcccaggatgaggcaggacccacagagtggcctctccacacccaggagttcagaatgccaagcttgatggagcttgtgggcaggaccaaaacctccttggaggtgacctgcatggacaaacctccaaggaccagaagaagggtgcacaatttagcagagatgtcatcagagaagggagggtgggatgcgaaaatttctctctgctcttctccctctacaactgcattttgctgaatttgtgcaggttaaataagcttatttcacaatgtgacttgacagtaataataacacaatcatgtcacacaaccaaggcctcagtttttggcagggatttaagctgtccagagctttgttgtgatcatgggtgcatttaacattcccgacaatctgccaggcaccagggcctggctatgagggaaggaactcctacaactcagagtccctctccttcactcagcatcctcaccagacctcgtggaaggaagaaatcctctttaaaagcagtgatattcatgcttcagcatttactgagcacctgctgtatattgggaccaggaagagaccctgccctcatgaggctgtcagtccagagcagtagatgtacattaatcagttaaaggcgaaagtaccctcacagtgactagtttctaatgagcaaacagaacttgtggaaggctggcttccccccatggcctcttataagtgtttaaaatcaatcaatcaatcagttaattagtagctgttcactgagtccagcctggtagtccagggctcccctggcccaagtggtctctatggaaggtgcagacacagaggccccatgcagatgccataacagatgtgagagcatttggcaaacaagaaacttccatcagacatgacaatttctgctatgatgcttattgttattactgcagtcattgttgctatcaccgtcattaatacaagcagtgcttgtttgaaggagatggcctgattggaaaacaggaccaggcttgcacgcaggatcagggtgtctgcagggagcaatgagctcaggacggagccgcagccttcacttgatttctcgccgttcctgggtctcttcttaccacatccaccatgtctctgggccctttaccgctcactaattatattttcattacatccacttaccccttttacagaaccaagtgtgttttttttgttagttttttgtgctgagacaggatcttactctgtcgcccaggctggagtgcagtgacgccatcatagctcactgcagcctcgaattcctgggctcaagcgatcttccagcctcagcctcccaaagcactgggattacaggcctgaggtaccatgctggacctgtgtcgttaaaagaaacattctacaattatcaccaatgggaagcccctattattagacatagataggaaacaacagttcaataaatacaatgattaaacattatttgtaaattgtagctaaattcagccccatgccccagctctgaggtaggtatcacttaacagaaagcctcaggatggaatgaaaaatgtagaggggtaattttctcatcatggaatccacgtcatttgctactttgtgcctcagctttaagtctctggccagccattttctcctgttgtgtgcaagttgatctaaaaatccccacccaggccccatcccacattcctgcttcctgccctcagggcaccttgcttggctgctgttgaatcagccttctctcctttctgttttttttaaattaaaatagaatttgtttatttttattgatatataataattatacatatttatgaggtacttgtgatactctaatacaggcatacaatgtgtaatgatcaaatcagggtaattagcataaccatcaccttgaatctttatcatttctttgtgttaggaacattgctaatcttttcttctagctattttgaaatacacaatatattcttgttaacaacagtcaccctactgtgctatcaaatgctagaacttatttcttctaaccgtatgtttgtacccatttaccgacctctcttcattgccctgcccacagcccccacacccttcccagcctctggtaactatcattctaccctctactgccatgcaatcaactttttagctcccacatgtgagtgagaacatgtgatatttgtctttctgtacctggcttatttcactcaacataatgacctccagttccatccatgttgcagcaaaggacagaatttcattatttttactggctgaatagtattcctttacccattcattcatgagtggacacttaggttgatttcatgtttttgcaattgtgaatagtgctgcagtgaatatgggggtgtaggtatccctttgccatactcatattctttcctttggatagatactgagtagaatgattttatctcctttagtgccttacccctgttccatagagtcacctcccaaataggccacctccacataaccctgggctccagctcagctttcaggaaaatgtaggataaagcatggtatctttctagcccctaaaactgccttgtgaaccccaaagacatgagtcctataacactagctccattacctgttaactgtgaaacctggaacaggtcagttagtgtttctgagcctgcttgcttgcatgaaatactggtaactgtgcttaccttacaaattaataggaagactaaatgagcagacagcatacagcaacagttttaggagaaggcagtggttaggctgggcatggtggttcatgcctgtaatcccagcactttgggaggctgaggcgggtgtatcacgtgaggtcaagagttcgagatcaacttgaccaacatcgagatcccatctctactaaaaatatgaaaattagccggtcgtggtggtgcatgcctgaggttccagctactcaggagactgaggcatgagaattgcttgaactcaggaggcagaggttgcagtgagcagagatcacaacactgcacgccagcctaaaggcctgaaggacagcgcaagactctatctcaggaaaaaaaaaaaaaaaacaaaacagtggcacactcaaggagcccacccaggtgcctggagactggcttttggcctgcaggtggtggtgaggcagtgcaagtgtgacagctgctgacaatgagatactacctgcttttgcagaacacacagatctatagcccagtgtcagccatgggccggtgctcacctggcgtttgttgtggtgctggcccagctgtccgcattgttggggatgttagagtggccccttctgggtggaaagtcgaggtccgggaggtctctatgtagctgtcctctgtctgataaaggatccttggggctgtctgtctggccactccggaaaccatgggccattgcagctactagctcagccctgatggggagccccgcagatggggcttgagtccttccacttactcttctctttctctgcctcatctattaccactccctgctggcctcctctcttacctgcagccctcctgtgcatccagctggaggtctggccacaccaacagctgacctggttccctagactttccagcccatgtcttggacatgcagttcccaccctccacttctctgcaaattcatcgtcttccttctgagactcctgtccctcagatctcctgcagagacctcaccttgccatctgatgactctgggatgcacctcccccctcagcctgtggattcctagagggcagcacctagtctctgttaactgccccctcaagcccagatgctgtgaacaggagtcagcattggctgtgtacctggctgcctctctgccccctgccctcaactacctcgtcccactctgccctgggggtggcttcagatgagtgaagctcagctctggacatactggacagattgctgttccccaactgtgtcagacccattgctgccctttgcacagtcattagctctaataattactgcaggtcctcaaacacttgtcattcaggtctcagttcacatgtcacctctttagagaacttccccgactacccattgtaaggttccactccctccgtctgaaatgatctgatgtgttttcttagtaatgcacgctctgcctccactctagagcatgatgactaaaatcctgcttatcctgttccccctctacccccaggttgctggcacagggcctggcccataggaagtatctacatgtattgaatgaatgaatgaatgaatgaatgaatatataaaccaatcaatgaaaaaacaaaccaatcctaccaaaagcctcaagacagacacaggtgggaggactgggtaggcattaccgtctccagtaacagatgaggcactagagtcaaagagggctcgcgagtgagagtgacagcctggagccagcaacactgctgtttttcccctgggctccttctctgacccacctctacccaccagtgaacccccgctggacatctggaaagggcatcttctccatccctgacatcactttggtcagaactgcgctggcctcactttctgattcataattcagcaccagcagctcactgctccagtcaggggtgaagcctcccattcattcaagatgtttcagaacgcctgctgcattaccccagaggcagcacagggcttggtacaaaggtggatgcatcacaggccctgcatccccggtattgatttctatatgtatgtcccgcttattagaccgccagaatttatcaggcagagaccaggtcattatttcagaatttctttctatttccccctttccctaaaatctgagggtggggtgcttctggaaaaacaatgcgggattataggtagacttttctacaaaataaacatgatggcatgaaagtactaaaggaaccaagatgacatcttcagaatggttattttcagaaaataattcattcaagaattgataaatagccctagtgtgatagagtgtttgggggtgttttttgtttgtctgttggggggcagttattatgaattgtcttttattttaaaaaatagtgtcaaatactatattataattagatagcaatttttacagttttattgaaatataaaggatacacaaaaaacagcacatttaaaaaatcttttactttaagttctgggatacacgtgctgaacgtgcaggtttgttacatgggtatacatgtgccatggtggtttgctgcacctatcaacgcgtcatctaggttttaagcccggcatgcattaggaaattgtcctaatgctctccctcctctttccctcaacctcctgacaggcccctgtgtgtgatgttcccctctctgtgtccatgtttaatgtgtacaatttgatgagtttgaaatatgaaaacacctgtgataccatccccaaaatcaaggtagtaggtacacttaacatctcctggagttgccatgatgcttttttctttatggtaagaactctttgcttgtttgtttgttttgagacagaatctcgctctgttgcccaggttggagcgcagtggcatgatctcaactcactgcagcctctgtctcctagactcaagccatcctcccactccagcttcctgattagctgggactacaggcatgagcccccatgcccagctaattttttttttgtagcttttgtagagacagtgtctcaccaagttgcccaagctggtctcaaactcctggggtcaaatgattcatccgccctggcctcccacagtgctgggattacaacatgagctactgtgcctgacctgtgataagaatccttaacatgaatgagatccaccctcttaacaaattttgagtgaacaacattgttaaccataggcactatgttgtacagcaaatctctataatgtactcatgtagcataaccaaaattttatacccactgatttttttaaatatggtgaatagacaactattttctctttactccaaacccagagcttctaagttggggctcttaaccttgggattgaacctgacctgcaatctatgctgggatccacaaaaatgcttttttgtttgtttgtttgtttgtttttgttttttttgttttgttttgttttttgttttgaaaaaggtctcactctatggcccaggctggagtgcggtggcacgatctcagctcactgcaacctctacctctcgggttcaagtgattctcctgcctcagcttccagaatagctgggattctaggcatgcatcaccactccaggctaatttttgtatttttagtagagacagggtttcaccatgttggccaggctggtctcgaattcctgacctcaagtgatctgcctgccttggcctcccaaagtgctgggattacaggtgagagccaccgtgccctgtccgaaaaatgctctttctattgctgctgggggggtaataatactgctttccaaagagctctacagtttgcaacaagtcccctcctggctgtggcatgagaggtacttcctgagggagagagaatgcatgtgatgagcggatcacactacagtgtgtgacttgctcactgattccagcattcggtttgggctaaactgtgttctttccattatcttggtttaaaaatataggttttttttttcattttttaaaaaatcaggattttatacatacctggaaaattaggaagtgggaccatactgggcctatagttctccaacaagagctgagccatgctctccccagcagatgggctcctagatcctgtctgctctggtcctcacctggcctgctttgctctttaggcctctttgtctgtgaccctggtttataagaaccatgcttcccaaccttcccccctaaataccctagaccacagatcacccctccacagtcaagcagctctgggaatagtcaaggttcctgcataagcacattattttgaaggcttaggtttcatcttgaaaaaaatgtgtgttccattttattatataacagggctatgtatattttaattaaaatttatatgtttttcttcccaatgtatggactaaaagtgtccctccaggaagatgtgccaggctgttctgaggctctgagtgttccaaaggtgttagctcagggtgccttctctccagtttgaaaaatacagtctctcccagtattgttgctcatcatgtctttagttcctttttaaaatcttccaagttcttaacttttgggcactttttaaaatcagaaattaaatgcccttaatttgggggagttgatatggccctcagagctacaagcccctttgggctggccccagtgcttgtgtggggaaggggccaggccccatgtccacatgcggcctggctggctcgtgcgtggagctcctgggcatcacacactcagcttgcatagcgctgccctcagaaacttttgcgggttatggcttatgaagggttccggagagttcagacgcaaatcgatagcatgcattacaagagagcgtgagctaacaaaggtgctgggggaccatgcatcttaaaacagcttcttggggactttaattgtcgggatgttcaggagaagaatatgaccttacggggcattttccagaatagaatagtctatatattaaaaggcagcaaatgattcataactggttagtggcggggcctatgggtccatgtttcccatgtgaatttttttttctgcgttgcaaactcttacattaaattgtgataaatgaagagtgggggctactcatacaaatcaatgactctagtgtgtgtgtcattagcctgagagatgcaggcagcggtcagtcccataaatcatgtgatgatctgctgtctgcaacacgatgcaagcaagcaggcacattagggaggttaaggaatgaaattaatctgtgcattttcctctccccctgcctccttccccatcacctggtcatacggaaagaattaaaatcacatgatccgaactaaaccagctccagaacagtaaattggttaagtttgacttcacctttcaactctgagttaattatgtattaggggattaatttattcacaggcactgggaagggaaatggagaatgggagaaacctgccagggcctctcatccagatgccaaagttattaattgctctggctgtgccacaggctacctggacagaccctggggtggggggctatgtgatcggccatggatatggtggggtctgtcctgctctgaggatcagccagcttgggttacagaagaggccccagtctgtgctccacagggatgcttgtgatgcttggttgctggagtatcttggaagcctacgctagaaggagcctttccccagggtgtgtagccagattacacttcagatggtaactgatacctcttccaaggccattcgccttgcctggaattcctccagtgagaggcagctctccatttgcgaaactacccattttacacatgcaactctgatttgcacaactcaagggtcctactccacccccttgggatcatatggaataccaggactacgtctcccacgcatacatgatgccctctgttcacccgaggacagggagcatgttctcctcaaacatcctccagggtgcctctccaatggcagcctttggaggcctcttgcctttgtggtcttcctgggaggtcagtcttgatctctcttctgtggtgtggtcccagccgagtgagaacagctgcaggtgcagcagtacccaggggctcctggagatgagacctggagcagataggggagctcctttctcagtgatgctacctggtggtgattgggcatcagatccagcaggaaaccccaggaaactcctgcctatttaagggtctgaccacaccagaaacagcctctcaaaagactccaaacgctagcatcatctgcatggagccatgcaagagaaattgttaggtatatttgtccatttgttgttaagacagaaggatgctgaatggatttgacacagaccctttgcttataaaaactcacaacaaccaacatgaatggcagcattaatgctctgtgcgtgaacagcacttcacaatgttctaaatgcgttcccatgtgtttgggatattgtttaatcttcccagcagtccatgagttgggtccaatgattcccatttgactccctaaggaaactgaggctctgagagtttaaaagacttggctgagttcacatgcctgggaagtggctcagccaccataagattcagttgcaggaaggatgggaccatctagggtctttcttcctatcaaatctacagatggaaagttctcagagtccaagcacccatgaccatctctagaggctctatgcagctcccagatccgtgtgctgctccaatagggttacaaaaacaagttgagctaacatctaaaaattaaaagctttcatagaaagaagggattttggcttctcttgaaaacttggaatctggccattgggctgacatttcactgtggtgatactgggttcatgatgagtggtggctccactcaaagggctctgagctctcacaggctcaagagacatgttttgggcagtacacacactgagacactgaccccccaaatcctcactctgtgcaatgacctaatggccctcctctcaccctcccataacccagtcttactgctgcccccacctcctggggaacccacgcatctctgtcctgcccatacactttctctctctgtccaagcccttcttggcttcaagtcaagctctggtcatttcactggctcctctgccagccttctccttcctaagctccaaaaggatttttcagctggttgatgcgggtgagcacgccagagccagatgcaccctggagacatctaaatccaaccttcttgtctgtagtaatgaaattaaggtgagacaggttgcctgaccttctatgtcgccaaccccattcccagaccctctcctggccccaagaagccaccctgatcatgttgctatctgaatgttcaccttggttgctcttttggggaaaaaataccaaaaacacagagaaaagggaaatatcaaaatccgcagcattcagaattaaccaaaaatcaaaatttgccatatttgttgcagaagtttaaaaaaaaatcaagaaattctgagttccatccaggaagctggcttcattatactcttaaggtctccacacatctcttcctgatccccttccattctcttcttccagaaggaagcattattgtgacttttcctccaaatccttctaatctatgtttacacacacacacacacacacacgcacacacgtttgtaaattacatatgttttttggttacatgcatgtgtttagatctacataaaacacttctgcttttttccatcaccattgcattttttaggtttttacggtttggctctgtccacccactccaaatcttatcttgaattgcagttcctgtaatccccacatgtcatgggtgagacctggtgggaggtaattgaatcatgggggcgggtttttcctgtcctattctcatgatagtaagtctcacgagatctgatggttttataaaggggagttcccctgcacacactgtcttgcctgccaccatgtaagatgtgcctttgctcctccttcaccttccaccatgattgtgaggcctccccagccacgtggaactgttagtccattaaacctctttcctttataaattacccagcctcgggtacgtctttattggcagcatgaaaatgaactaatacagaggtcgactcccaccctcacctgtaaatccagcctggccaaatcccatcctctgagggatgtaggattttgtttcccagatcccctttataattacttaattaatattttttagacagagtctcactctgttgcccaggctggagtgcaatggcatgatctcggctcactgtaacctccgcctcccagattcaagcgattcttccacctcagcctcccgaggagctgggactacaggcatgcacaaccacgcccagctaatttttgtatttttagtagaggcagggttcaccatattggccaggctggtctcgaactcctgacctcgtgatccacccaccttggcctcccaaagttctgggattacaggcatgagccaccgtgcccggcccccctgatccctttttgatgggcatgtgcattgtggattttttactatcaccaatgaagctggaacaaaactctgcatcttttctggggtttgctaatgaggtctgcctagagttttatttactctctaaatgtgtcatgggtccctctccccagtgggactgagaccttctgggggaccctagggaccacatgtgaagatacccagcacagcccccagttggtccctcagtattttccctggcatgtgtagtcgcatctctcccttagctctccactgaggctgcacgtgctggtcacacagccctccagctggctatgtccccacatgtaagccccagggagccccagcctacggcctgtgcgtctcaggcccattaaacctctcactttgtatttcctaattcctttaagaaatcccaaacctgtctccttggatagaaataaaataaatgtaatatctattgctatcgcttaaatacaaattatagtattttttattaaatactctcttgtcaaatgcttgacattcctcataatagataaaaaaacaactaaaactagttattttctgttaccttagaggcttgcaacgtagtttgtattgtatttacttgttatgttctgcttgtcgcatttcattataagcacgtgaattattttccctactaaattaaaaggcaatatccccgcccccagctacccttgagcttgtataaaaggtgaagatctggagctatgggctctgggaagccacctggtgatcagggtcacagatcctctgccagctcacagtcctcctctggcataggctggcccagcccccgtgcctggtaatggggtcaggggaaccaccccaataaactttgtggtggggaaaggctacatgtatcattgctctagccttacactcttttcttcccactgtttcttatcgtcatcatagcatccctataaggcagcaggttgggactactgtacccattttacagatgaggcaacaatcctgaaaggaacttttgagttatggtcaggcttagggctagagccctgcagattccatcgcttccaccagcactgttgccacacacatgtgccaactggaggttaccgtgcaccaggcgcttggggaatcttttcacgtgcaatgccttctttgatcctaacattagttccttgaggtagaagtactgttatctctcttttatagtgttgatgaaactgcagctcatggaggacaaagaagtgcctctggttgtataagtttcacatgcaagagcagaggttggagccaggtctgtctgactttagagcccagttcagaagcagtgagaagaaacatcttcagctctttggggtcaccatctcttttaagaatggggtgaaatctgtgccctgacctccttccctcagggagtgcctatttctcacatcactggcattttacctatcattttgtgagctgctgggactagctggggctcatgtctggacccacacaagtcctgtgatccaggtcagaaactccctcatgagagcttggaatcagatgcttttgttgtgtacacagcctaaatcaattgcaacctcaccaaatgctctgtctcctgccctcctttcctgcataagctctttctggtagcttagattttccagactcagaatttgaaatgggttccagtggaacttgggagagtggagtttcttacagtgctgggatttgacctatttttctctgagcccatggggacttggagagtaatgagcctgtgcacccctgtcagatcctcctgctctttcagtgctaccctccctcccgtcatggcacttctttgaaagaggagttgatacctgagtagtaattcatggtgcagatgcaccgcgttttccttacccactcgtccactgaggagcagttaggttgggtccacatctttgccatcgtgaattgcgctgcaatcaacatacacctgcaggtgtcttatttataaaatgattgcttttcctttcggtagacgcccagtatgggatggctggatcaaatggtaactctacttttagttctttgagaaatctccatactgttttcccatagaagctgtactagtttacattcccatcagcagtgtctgagcgattccttttcaccacatccacccacacatctttttttttttttttccttttaaaacatggccattctgactagggtaaagtgttatctcattatggttctaacttgcatttccctgatgactagcaatgttgaacatgttttcatctttgttgccatttgtatatcatcttttgagaaatgtctactcatgtcgttcactcacttcataatggaattatttgtttttctcttgctgatttgtttgaactccttgttgattctagatattgatccttttttgggtgtacagttccttcagatcacctgcaagcctggcaggttctccagccaagagcccagacaggcttggtacctggcagaaagtcatgaaagctcagttttcacatctgtaaaatgcagaaccctttccgggtacttccatgtcaatgagagaactctgactcctttatttctaaggaccacataccttactatttctcctctccctacacatttagacagtgggcctctggtttgaactgttcttgctgcttaatcttacagagaacgttctcaggattccccctatcttgatgtgtctctctgcatcagccactccatcacctgaaagctttgtagtaacacagcacctctcagctgaggcttgcttctcttacacaagtgcttcccagcatgcactgataacactcggccacacagggagagaggagctgataagtccacatgcacatcagaaaatgatgccttttaaatgcaacagccaccttattctggaggtaaatcacagcactgaaaaatatctacaggtacctatggaggaggaagataaaagaaaaaatacctttttttggatggaaaataagaagccaagaagaataaggttttcatgcatggactatgtcaaggtcccacgattgccaccaagaccaccatgatggaagcatcttcttcattggccaatggacatcagtgcaaggatggtcgtgcatggaaaagaggaggcagaagggcgggagggacttggtcagccttcagagtgagcagactctaaactggacttctacctggcccatcagatcatactgctcatgcagtctgtttgggttttgtttcctctggggacctctttcactcccacaaatatcctacaacccttgagtaggaattaaaacccatcagagatcgaaatagaattggttatggtaaaagggagctgaaacagtgagaaagggaggagaagggaagaaagattaaggcagacaagggaacctgtggagagagtgagagctagagacagaaggagagaagaggcagggccgtggaaacagacacaccatctctccaagtccttctcaaagacactggaagagttctggaaaccgaacaggtatggaacacggcaagtagtggaatggagagctcagcccattttctggatttttagggccccagatcacacatcctggaatttctcatgttgttctctttatctttgttacccatccccgacctagattttcagcctgcaaaggcactcttgctttcatcaaaaccagaattcccactgtgtttttgtcaagcacccttgccttcctcctgggattctcatctgccttttgtttcaattctgtatctgtctgccctgtcttcttcttcttcttcttcttctttttttttttttgtctcactctgtcacataggccagagtacagtggcatgatttcagctcactgcaacctccgcttcctgggttcaaacaatcctcgtgcctcagcttcccaagtagctgggattataggcatgcgccaccatgcccagctaatttttttatttttggtagagatggggtttcaccatgttggtcaggctggtctccaactcctggcctcaagtgatccacctccctcggcctcccaaactgctggaattacaggtgtgagccactgcacccgaccaaccctgtcttcttctttaggtcagaattatcttgttgccttcacagaccacagctggtcagctgcttcttccaccactctgacgcaactcaactcagtccatcgtctccaccccatacaaggaaccccagttggccagcaaggtctccctgacaggggaagcatttctctaagctcagaggggttgacaaagtggaaactgcccactctggaggtggcttcttctccccaaggccagcacagaattctcctgggctgtggcattctcttggagagcatcttgatgcagatgaagggtgctatataaatcaatggatcataagtctgttggacagcacttatataggtaaatgcatgtatgttattcactcagtgaaccttcctaaaaaagataatatgctcaatatctcaccgtgctgacatatttcaactcaattgataatgggtcaggattgagcaaggcttacagagtgaattaccttttagccatcccttccagtttagggttgcagtcaccaacaaaatcaatgtcgaaggattcttgttgtctcaggcaataccaacagtgactcctaatgaaataaaccattgaaaccttttaatcagaccacctgcctaaaaggaggaagccatccagcggaggctggggctctagggatctattttccccttaccggtcaacgcatgagtgattctttaattgtagtaatgatgtgcttaccctggacccagacacttgggcagcaagaggcagcaattctctggggcagagggttggcgtgacctcagctggggctgcacaggtccccgagcagggctgcatcaccaggggccatgcaaatgcctccaggttaggggcctgtttgactcccagacatgtgataaatctaaatctctattgaaagaaagccctgcaataaatgagccctgctctacatctgaattctagagtcactgttacaaaaataggagctggctgcaaatgtgaccatcaatgggctcctgcctctaccccttgctcttccctcctccctgacctgcaaatttctgaaaaattagctaacatcaccttaaatatatttaaatattaggaagccaaagggagtccaaaaacaccagaattgacctagaagctctctgcaaggctctcttttgtgtccactgattcactctgaggcacatttatggtttccttcttctttatggatcattcctggattttctttggaaattcttctttccctcatgctcctgtctgagtgtgctcttctcttagctctgtggtggacctaggattcaggtctgtattagtctgttttgcattactataaaaaatatctgaggctgggtagtttacaaagaaaagaggtttattcggctcatggttctgcaggctgtacaagcatggcaccatgaattttttatggagaggcctctagaagcttttactcatggcagaaggtggagggggcaggcatgtcacatggcaagagggagcaagagacatgccaggctcttttaaacaaccagctcccacgtgaactaatagagtgaggactcactcattaccatggggagggcaccaagccattgatgagggatccacgcccatgacccaaatatctcccatcaggccccacctccaacactggggatcacatttcagcatgagatgaagaggggacaaaacattctaatgatatcaaggtctaacttagtcagtagttgattccctaatgaatctcatcctgtcaaccagagtgtcaactcaggacttctaatggggtgactaacagagaaaggcctggttctctctttccaatcagacatggacctgtggagtgtgtttctggttggtcattagctggtgaaaagcccatctgaaaatgtgacccacaccaaggaagttgagataagaggctaaggcagtgattccaagcctcaggattcctacctgaagttctgacccccaagcaagatcttcttggattatttggtttgtgagtcaagaagttccctcttcactctggccacttaggcttcttaggcttggttttatctccctccttgtcctcttcctccctcctcctccttctctttctccttcatctcttcttcttcttcttcctcctccctcctccttcttctctttctccttcatctcttcttcctcctcctccttcttcttcctcttcttctctttcttttcctcctacttttcctctctctctcactctctctctttctctctctctctgttgtcacaggcaatcaaagaatcctaatggatttcacccacctacaaggaaaaacccatgagcattgggaaataaggcttctttacatctgaggaagaagcccttcctgggaatccactgaggaagggctcctgtgctcctgtgaccacagcaccaatccatgaggctactggtttgagtactaaccaataaatttacaaagagccttttaaaaagccctaagaaagaattgagggcacagatgggaagggaactgcctttcttggtaaacaaattaaaagaagagccactatctgtctagctggtcatactcagaggcacatgatcccttgaagtcccatttttctgattgatgatgatggctacagagaggagctcctgctatggataactttgttgaatccccaatgtgtctagaatggccaagaatgagtctctcagcagccagcaccccttaacacttcccatgaaagatctttcgggtccctagaaaagatccgttcatacgctggatagctggatcagtggagatgacaaataaggtgatcaggcatgccagtaagttggaagaaaccaaagtcaaaccaacagagtatgagttctcctttcccttgggtctatgtggaagcttcctagatgtctgagcacccagaccccaataacttcctctcacccccagccctcttttggggccagtgccatgggaccagttagtgcaatggaggtccagcattctgcaggatccttgagtaggaagctggtggagcacccaccgccctttgtctaccacggtgatgaatggttgttgacaaggctaaacaaaggtattattagtagattacatctgagaggctggactcatgcagaaacagggcagcaagagccctgggccctgctcagcccccaattagtccacaaaagcctaaaccaccaggtcagggataaaagtgaataaatgtttctaaattcttatcttaaacacacttaagcttaaagctatttaactggagctttaaaagcatgtgagcttcctggagcccagctacctgcctcattctcttgctcttatttttgcttttatccttttagtctgaagaagcctaattagaagcctgaacagggctctctctccctgcccttaaatcagtaattggcttcagtgcagagactgtcaggaaattaacacatcacaacatgacagctgttaattttttctccttatttgtcatatgaatcaccgctgatttgccggagtgcataacaaattagtgggctgtaatcagcggcctctcttctgtgagctgcaccttccctttttttttccctttttctcccctctctctctttttctctctccccctacagtccattacttcactgcctcagcagagatgactgctcctaggtgtgtcattgtcaataaatcagaataagcaaatgctaaaagcgcaagaagctctttaaactttgatgaaggcttttagttacatttttaaacttacactcataacttgaatctttttttttttaaattgtcactccccggtagtgatagactgtcaggtttccagtcatttcctcatccaacgtgccagggaaggtggaactccaagtgtcatttgcacaagttctggctgacggaggaggtggaagaggtgttaaggaaggcaggggaagggagagatatcagagattccaacagggtcagaccaaggcactttcccttttgagtgagagatttaggggaggccaggtatggtggctcacgccagtaatcccagcaatttggaggccgaggtgggtggatcacttgaggtcaggaattcgagaccagcctggccaacatagtgaaaccccatctctataaaaaaaatacaaaaattagccgggcatggtggcatgcacctgttgtagtgccagctacccagggaggctgaggtgggagaatcatttgaacctggggtcaaaggttgcagtgagtcaagattgcaccactgcactccagtctgggcaacagagtgagaccctgtctcaaaaaaaaaaaaaaagagagagagatttaggggagagaggaaaacaggaggaaaaatgggaggtgtacacacagggtgggaggaagagacatggattctggaatctcatcctcctcaacctttccaacttgatttattgtccactatatctgagtcatttgaggagtgtgggcctttgtttgaacgcctttgtagggacagccaggactaccaaacagagtcatgggttctcagactttatttctcattcaaccttgcagaagacatattggtgggccttaaactcaatacttatcacctcctgaaaggaggaagcataggaaggatggtagcactggaaggcttcaccatgtgggtttcagttctagactctaagatttgccaaacaaatctgtgttctctgcatccatactgtggatgcagaaggggaaggcacttcttccttcttccttctcagcctggacctattgtactgacaagcccatgtcttcctaacctggggccagtagggagttggtggtggcttcacattggggcaccgcctctcagggacctatcagcatgttctgttggctattacagactgatgttgaacctaggggtgagagtatttcaagggtgaatttcttctttcctttcatttactacccatccatgcatccatccatgcattcatccatccaccaattcatccattcattcatgcaccaatttatccatcaacccatatacccattcatccacccacccacctatccatccatccgtctacccatccacccatccatccactcattcatccatccatttactcatccatccatccatccatccatccatccatccatccatctccatccattatcagtgcactttgcatgcagcagcatggcatgagcccagtgcatgaacaggaggtcagagggagagtgtgggaaatgctatctatctcaagataagcccctctcaaggtactccaggatgtccccatggtggacatggaggagggcgaaaaagccttgcattcttaaccatagccataagcaggtgggttattctatgtatccatattagtcttaagtcatccttttcccaagagttactctaatgactttcttgcactaaattctaatttgctacttgagagttgagtttggttcagtttatcgagtacattagcaggactattatgcactagatactagtttaggagcaaaaaattcaataaattagggtctatgcccttgaaaattatataggttttagaaaagctgtcataattttaaaactatgttttattcgtttgtttttcaattctcaacacccaggatgtggaatgtatgccctgcaggctggtctctttcctgagagctgagatgtcctgtcctaaggtacacaaaatagtcttctaaacatcagccattttaatagacagagccatgaggtcttgctcatgtgaaagccactgaaatcttttggaaatataataattgtcttttttttgcttgtgataatttatgtatgttcaatgtatttaaatacagtttaatatgctgcatcttataaaaatcactgctgagaaagtttctgtctaatgtcatttttgtaagctccaagaaagggtttttgagcaaaataccaattttacaattactccgttgaatcctaatttaagaaaagaatcatttattcattatgtgaggtggaaagaattttccaggagagactaagattgacagtaatgaagtaggagcttcacagaagaagcggtagtgggagttttgaaattctgggaccagcgcaggcccaccataggtatggacacctggctggtcctgagggcccccacaagagtggggcatatcaggttagatgcctctgaagacaataaggatggattcaataagtgtttccaacacttggcagaatccagtggaccaatgaatcctgccacctgctggctggcccttgaggggaagggcgctcttcctctacacagtagtatctctccagcacaagctgacttcactatcctcccattcctgctgtctttgacctgtagtcatcttctattcctacgttatacagagcttgcttttctctgagcacatcctttgtactcctctcccttcttaatggctgtatggaagccatgtttcttgattaaaaaacctccttaaacacaccttatatcttcaacgtccatgctatagtgactgctgtggtcttggtgatacactttaggaagaaactttccctgcagccctcgagggtggcatgtcaggatcaggagtttgtgtcttctttgtatcccaagacttttgagaactatttctacttctgcctctgcaccttttagattagcaccatctggctctgctaccctctacttcttatgatccccagcatttaccactctcctgggcacttttgccattcaccaagaatcatgagaactgggtcaacatcctcctctaccaccaaatattgtcattatgaagggtgaactcagctttaacaaggatgatctgtagcccatcactgttgtgttacagatgactgatccacttgcccatctcagtgacctcaccctactttagccagccagccaggtgctggaccatctccgcccctaggtgcaccataccttctccccaaaactacaactctctcaaatcttaaatgctagaaccatctcattctcaggtccaatgtcttatcctagctctcttaaagatttcctcatttttgtacatttacttctatttttctgagacttctgggtcttggatgctgatatcatttgtattcccacccaaattttgacctgtcatcccaagatgtcaagggagggacctggagggaggtaattggatcatgtgggaggtttctcccatgctgttctcatgatagtgagggagctctcacaagatcggatggttttatagggggctcttcccccttcacttgcttgctgtctctcttgttgctttgtgaagaaggtgccttgcttccccttcaccttctgccctgattgtaagtttcctgaagcctcctcagccatatggaactgtgagtcgattaagcctcttgtattagtctgttctcacgctgctataaggacatacctgagactgggaaatttataaaggaaagaggtttaattgactcacagttctgcagggcttggggggcctcaggaaacttacaataatggcagaaggggaagcaaacatatccttcctcacatggtggcagcaaggagaagtgcagagtgaagagagtgaagatggttataaaaccatcagatctcatgagaactcacccactatcacaagaacagcatggaggtaactgcccccatgattcaattacctcccattggatccctctcatgacacgtggggattatgggaactacagttcaagatgagatttgggtagaaacacagccaaaccctatcacctcttccctttataaattactcagtcttaggtatttctttatagcagtgtgaaaacgaactaatacagatgccttctgagcatcttctgagattctgaatagaatcttctgagcattctattttccttctgagcagtgctttctccctttgtttctccatctcatctccatggtcttttgtttcaaccattctcatgccactgagtctcctctatgacactcctcctttgcttgtttatgcctcacccaggcaaattcttattcttgaagcaatctcttcattccccacctctattttcactctgagttggcaaggaccactggagaaacatcacgcaaactttgcaaagcttgcaaactggaggcaccacaaacacaagttctttaggtgctgatgagtcttctgcactgatgagcactcctgcaaggtttctctccagggcagtaaatcctctgagtggttattccaaaactccttaatggttttccagtcccttactgccacctccctccctcacccttctccttctctcccctcttggtgggaagtctgtccccatgttggaagtagttctcctatccccacctccctccctcatcctcctccttctctcccctctcacagcagaaagcccataccctagtgttggagatagggcctctcaatttccctctgctccagtcttcccattcctgccccctgagcaccatggctgggtggatttattccttcatacacacacacacacacacacacacacacacacacacacacacactacccaggctggagtgcagtggcgcgatctcagctcactgctaagtctacctcctgggttcaagccattgtcctgcctcagcctcccaagtagctgggattacaggaatgcaccaccgcacccagttgatttttgtgtttttagtagaaacgaagtttcaccatgttgcccaggctggtcttgaactcccatcctcagatgatccacccgtctgggcctcccaaagtgctgggattacaagtgtgaaccactatgcccagatctcttctagattttatcatctcccactctttatctctctttgcttattccttccaacaattaagcatacttaaacatcatccacatttatgaagaaagatatctcctacagccctaaggacctttttgtcctcacaaccagtaagtttctaaagagttatcatctcttgctggacccacttctcatagctctattccctctttaacatactactgtttgactttggagccctccatctctcaccaagattgcttaaatgcttgcagacagataacacttttcaattttcagctaacgtgttttatttttccgcaagcatgagggcataactacctcttgaaaatttgacttacgagacaccacagcctccctgggttctttctttgctgcctttctggccattcctttttgggctccttcggagacttctcatgatctcctctctctctctctctttctctctctctctctctctctctccatacaatatgtcatttccttggggttttattgtattttttctctttaccctacgtactctgtaggcaagcttggcctctccttttgggcttcaaatatgactttaagcctaaactttctgggcatctactcttggatatctcatgagtatctccaaagcgaacctgccgtctctctccccgtcatcaatggacttcggttcttttccagggatgaatgacaagaggtcatcctgggtttcttcctctccaatacagtcactgtctaatcaatcaccgaattatattgatttcccccatctgtccattcttgccgttcccactgccatgaccctgatccaccaccactactttctctcatttgattaatacaacagcttccatcttgccagccttcactatacccaacatattccacactgcagccagcatcctttttctcaatgcaattttatttatttattttgaaatagagtattgctctgttgcccaggctggagtgcagtagtgcaatcatggctcactgcaggcttgacctcctaggctcaagcaattctcccacctcagccttctgagtagctaggactacaggtgtgccccaccatacctggataattttttaaattttttgtaaagacagggtcttgctatgttgcccaggctggtcttgaactcctgggctcaagcgaaatttgaccttgtcgcctgcaggctgagacactgctgcagactgccctcatccttgatgtggtttacaagaacctttatgatgagacgtcagcctagggtgggtcctcatttgcccacccacatcacaggttctaatccagaaacactgaattcattcagtttcctgaagttctgatttttctctactctctaggcctttgtccatggtattttctctacctagaacaccgctgtctacccatttactcctcaggtttaagctccactgttgcttcctctgtgtagccctccctaatgtctgtccccacctcctaatctcccaacccagagattggggcctgggtttctgttactagcaacacagccggatgtggcagctcacatcacgtggccttgatgacatgtctgtgccacatcaggccccactctgagaagacagtactctgtgttggggtagaagctccgttgtgttcattgctggagccctgccaagcaccacgccttgcccaaatagtttctctggaggtgtcagtcgagttggtcagatgccttagtcatcggtatccacagggacagacctgaaggtgccttttcatatccttgcctgcaagtcagtctgtgtcttagactctaaagtttggaattaaatttattatctacatatcttttggattttatctaattttctaagacagctgggtcaatgaaagtatctttatatccccaaataaaaactcacaagcacttagattccgcatgaatctaagtagctggtgatttcaatctcctagcagatgcttggccctgcaataggcccagctgggctgtgccctagggctaccgcccctcgcacatgttggaacccacccctggtattctggagaagccctctcagctagaattattttcagttcagcagttcctgaaaccctagagcctgtagagggaaaaacagaaatgatttccagtccagggcaaagtgaggctgcatggaaaaagagagaaagtcagttgttggacggcatcaaaagtcagcctgttctattaggcaaaaataaacagaggcaggcagaaaccaaacaagacaaaaatgttcattagctgcgccaacccaggccacccacttcgttgaactgaccacatcacttcgagattccctacacacggccccacccttccctgctctccccaggggtagacaaggcatcagagtggaaaggaagagaccagcttaaaccagaataacctccatcccccacttccaaagctgcccagagatgggctttggcagcagatccaccaagacgtcagtcgtgggggagttccctgcctggctgcctcggtttctccttgatagcacagactcattgttatccgtttacggaaatgagcctaaaacaggggtcagaacagatcagtatctgtggggaagggcagcattctttggagaggcgtattcaggattcattatctctttataattaaaaacaaactatgttttcccattaaactttacagaaagttaagtccaattaaagcatctggcctccttagggagtgcggagatagcgtcctcattagctcctgcagcgactcttggggttgggggaggaagggcatggagattttactttatttgtttgttcactgagttttttcctcactccaccgtcatgtgaaggtggggatctgcacattttgctcaccactgtattctcgactcctagaacagagcctggcacgtgtcggacaactgtggagggaactgatgagtgaaagagagaatggagaaaggaatgaatcagcataagccccacagggacaaagactgtaactggagcaccctttcatccccactgctggacacagggtggggaacactaaatgtgcgctacgcattgtttatcgaaacaggctctacatcaaaataaaaaacaaaacgaaaaaacaggaagcttttctggatcaaggctagcgttttacagttgagatatggaagcccaaggaagaagggaaatttgagatttgcttgtagcctctgagctggtcagctgggaggctctggccaaggtggggttgttgagccccaggtaaaagccccacccagcccctcttcttgctgtctgcaacagggcagccacactctgtgctcaccagggagtcttatctggagttcaagtcccaagacctgaccttcggggcctcccaataaaagggcagagatctttcctcatgaatacgccgggcccttgcggctccctcaactctcagcagccgccacagatccattctcctctctggccccaagagcacacctgcttgcaggtttctggatagggctaaaatgaaaccgggacaggtgtcaggtgaagggccgaggtctaggcctaaggggtgctgctttgcccagaaaggcccagatgagccagccttgatttgcagcacttagaagagcccctgtggcttttggcaactcaggacaataggtgaactcccaggaaagtcactctccttccaggcccagcccaaatgctacctcctccagaaggctttgctgcccccagcactggtgcgatgtacccctgcttggtgggagtcctctcctctgggtctccagtcacttctcagtggcctccctctcagcttgttcatctgtcgttgcataggaccgtgtgcgtcaacaccaggacaatgtttctggtcttctttgaaccttctgtgtccagcacagtgcctgactcccagcaggtactcaggaaatacttctgacaggtagaaaaggcctctctgcatctttagaaccagagaagccaaaagaaactgaaaagatgctctataagaggctcaggggttacagaaggaaaggctgtgaaggaaaaggatgcagccctggccaacaagctgagatctctggccgtcctgtcgcctttctgggcctcagggccacgaggctgctggatgcagtgggactgacccctggtgtccaccctgggacagtcagatcacatgatccgtattagataaaaaaagcaaatatacacctttgtttaagatgccacatgcctgatcaaagtaaaggctgtttactcaaccacttgttaaactcaggaatagcagacttgctcatctgaacccaagcttgcagacaggacgggagagcagaactcatgcccgagggctttccccggagcaaagtcagggctggaatgcttgccaggacagcttggaaggtggaaggaggcggcagcacctgtcctcagtgtgtgtgtgtggtttttctcacttctcttcccttacccagtctctcctctctttggaggttatttgtggggcacataggctgagtttcctgggaagtagactcttgggaaggagattagtgtgcaggagtttgctaatgagtactcctgagatcccatctatggcaaggaaggaaacaggcctgagcagaggataaagtcaggctgccatgaaatcttggccgaacgctgcagccagtcctgcagagagtcctgaagatgggatgagccttcagagctgcccagctcaagggagagagtgccgagtgtgcctctacataccctgtccccatcaatcaacactgggcatcattgcctgggacagaggtagagcttgggcaaggcagtggtcttcagccaaggcaatcctgaaaggggctggctgctgcgggctgtctgtcaggggctctcccaacagagaggagaatgagttctgaaacgaggtctatgcagcccctcccagcggccaccacatgggggttgacagtgaaggtgatcggagtggcatcagccgtggtagccagagagctgttcagcttgatggggaaagggagtaaggaacgaagaatgcaacccatgtgaattcttctaatcatgccttctctaacccccagcacattaatcttgcctggcttagaagggagtcaagtgtcaaatttaaggctattctacttttttttcttctaattctatttccataggttattggggaacaggtggtatttggttacctgagtaagttctttaatagtgatgtgtgcacccatcacccaagcagtatacactgcactcaatttgtagtcttttatcctttacccccatcccaccctttctccccgagtccccaaagtccactgtgtcatttttatgcctttgcatccttatatcttagcttccacttatgagtgagaacatacgatgttggttttccattcctgagttactttacttagaatactagtctccaatctcatccaggttcctgcaaaagccattagttcattccttttatggctgaatagtattccattgtacatatataccacagtttagtttctttatccacaagttcattgttgggcatttgtgttggttctacattttgcaattgagaattgtgctggtataaacaaacgtgtgtgcaagtatctttttcatataatgacttcttttcctctgggattgctggatgaaatggcagttctacttttagttctttaagaatctccacactattttccacagtggctgtactagtttacattcccaccagcagtgtagaagtgttccctgttcaccacatccacaccaactctattatttcttggttttttggttatggccattcttgcaggagtaaggtgatatcacattgtggttttgatttacatttccttgatcattagtgagttcagtgaggttagcatttttttcttttttatttggccagtatatattctacttgaacgacccgcattctataaactcagacatccaacccggaagcccttcttcattgatcagaaggggaggagaggcctggaggggggaaaggaatggctcccggccatgcagcatatggagccaggagtagagccactgatgctgtctcccagtctagggttgagccaagagcacctttttggcctatgccttgcaggtgaccatctttctctcccatcaacactgcaccgtagacccaaccttgtgaaatttttgcactttcacaaaacccagttcaaatcaatgaggctttctgagttcttattaactgctcagtagtgtcctcaggctacaaggaggcaagaaagagaggagtcaaggtgctgcctttggtccaggaaacaataaccatggccagaaagcaaccaggagtggtggctcacgcctgtaatcccagcactttgggaagcctaggagggtggatcacttgaggtcaggagttcgagaccagcctggctaacatgatgaaaccccatctctactaaaaatacaagaaattagtcaggtggggtggtgcgtgcctgtaatccccactactcgggaggctgaggcaggaggattgcttgaacccaggaggtagaggttgcaatgagctgagatcgcaccactgcactccagcctgggcaacagagtgagagttggtccaaagcaaaacaaaacaaaacaaacaaaaggcatggccagagagtaaagggagagcacagccaggcaggccggaagcaaacaccctgcgagcatattccgacccaaggggcaggtgtgcactgctcagggtgggccaggagagaggctgtggaggagccttgggaatgactttctgtcctggcagtagtgtaaggatgtcaagaaagatgtatgggaggacaaaggcattgcctagggtgggtggtccaggcagggcacccctgcacctcttagcagaacttgaggtgagccaggaagtcacattgcagaaggacagaattgtgtctgatggtcactgtggcaggcccctgtcctacctgggaaaaggccactctctttggagttcagtcaatgagtggtcacactggagaacagcaatccttgatgctctggtggcatccagagttctgcagaggacctgccatggtcgggggttgtgattcataaggaggccactcgctgcaggcaggccaaggctgcagaaggagacatcagggaaacagagggaagacacagaagcggggacatggtaatatccacatggtaaatatcacagcagatatagccctgcaggaattaaagccaccagagattagagtcaacggcagcaaaggagaattttggcggcctcgctgggacattgggccatcccaggcttttccatgaaggtggggacatctggtgtttttatggtgagggccacccaagccaggcaagtgtctttcccaggctgctgcagagtggggcagcattgggtgctcataggcatggggttggccagcagcagcccaggggtcattgtactttgcaacattgcacttgcactcccaaaaagctgcattcctggagctccttcccagttgttttggaaaaggtcagagcaacaactgcatttctagtaccacatcagcaatcaaactccatgcctggattggccttgttgaggggatgatgtttctaagtggttgaatggtggaatacgagcccatgaatgcaggggtgacagggactattgctgggtccctaggctctcattctaccaacatgtgccctatgtaatagtcattagtgccagcaacaagtattcctgaagaaaggcaagcattaatagctagctttgtcaatgaaatgggacagatgttacctgtgtttctcccagggtggacacctttggaagagtgcctgatttgcaatctgccctgcttcatgttatggggaccaacaacattccaggaggcagattgtctgtcaatctgagatttctgatgaaaccgcaaagaacagatttccaacaccatccaaccctgccaagatggagaaattgttctaagctcatgaattcgtaaagttgtttgttactgcagcacaacttctcctatcctgactaatacagcacatctctgcttaaactcttcaatggttttcctggaaactatggtataatcccaaatccccatcacagcctataaggctttatttttctgcctctcttccaacttcatcttccactggtcctgcctttctcactcggtttcagccacagtgaactttctgtttctcaaatacgccatgcttattctggtcccagagtcctggcacttgctgttatctctgcctgggataatcttcctgaccctcagctctgactggattcagatcctcttagattccaccgccttgagcaggcatttatttcccttaccactctgtctaaagtagcccagtcactgtctatcatagtaacctcttttaaattttcttttgagcattcattacgctctgcagttacttaggattgtaagtaaaatgcttctcttttcccctggaatgtgagacaggaatcttgtctcttgacagcacctagaataaggcctggtatgcaatgagagttcagtgaacatttcatgagtgaatgaatggatgtgttatccgtggaattcattgactcatggacaacacacaaaggagagactagatgaatggttccatttttacaaacagacaactcaatgcgtcccagaaatccagcactgctggccctacctagttcctggcagggaactcagctctgatttggagcactgaccatttcctcccagattcgggcacaagattcactgtgataaatggcctgagctcctcgttgcatttaatggaaaaccctgatccaagtggaactgcagccaggtggcccgtgggagccctgggatatgacttccagggagaccacaaaacctggataggcggacgccgttccagatacattaactcataatccccaggaagcgcgcacttccgatgaaggaagaggaggcttcccctctcacaaacactaatagccatggttaatcctcatcccaggaaaaggttcttgcccaagtgtctggagaagcttcatcaacgtcagcacagggacccgatgcagggacagataatggttccagaaggcgtctgctcagcggccttcttggattatggattgtgtggggccgttgctggggtggtccctgagcagcagggagactggtgcagccccaagcagctgcccggctgagctcacctgcttgttcttggtgtccagaggcggctgtggctgttcctggaatttcggatgtgtgcttttatgctcagtagggatgcgggagcctgtgtctgggctcctaaagtgaaaagggcagggctccagtgattttgaatcaagttggaagtccgagatgcccatagagccaaccaggctgcctcagccctccaaatgcaccttgcctgagctcctcctgctgccctgcgaccccgacactcaccccttcccctttgtctcctgttctttttcttctagacttggctgagaacatcctccaggtcttaaaacccagcctcctgatttttgtttctctcccctaggctgcgtggtgctggggggatcctgtgtcctcccaaatttcccatcttccctctcatgactactgccaaactccaccctcggtcttttccccaccagtttcttcttgcgagccagaacagaggctctcaaacagcaattcacacacctgtgtcatttgtgttaaacgaaataaaaagaaaggccaagaagtaagtatttttaaaaaaatattttttgaaacaggtttttttttctttctttcttttttgagacaggattttgctctgtcatccagggtgggatacagtggtgcaatcatagttcactgaaacctcaatctcctgggctcaagcaacccgcccacctcagcctcccgagtagctgagactataggcacatgccaccgcacccagctaattttttttcttttttttttttttttgttttgtagatacggggttttgccatgttgcccaggccagtcttgaatgcctgtcctcaagcaatctgcccacctcagtctcccgaagtgctgggattataggcgtgagccaccatgcccagccttccaaggagtaagtttttcataaaaagctaaatgtattttctttaaaggattatctgttatttggggaggattttcattttgagacaacatagagatggcagctatttatgctcacatttttatcatgtggactgcacctggtatcccgaagcctgagcacatccaggacatgggacatttctacctgcccgtcctgttgctacctggagtgtgttaggctgagacctcatcatccacctttctgggtcctgtgtctcacagggaggtctctgggctcgtctgtcctctaacctcttgacccagggatctcctgcaggaaccatcatgagctcacccctcattcagtggatcacattcattcgttctttttcctctacttctttgggctcctcctccatctctccatgccactgccactcctgaaattcagagacctgtcatctcctgctcacattgcagcatagcctccaactattcccgagccagtgcgttttcagctcaccctcatccgccaagcaaaggccagtgtgcccatctagtttaaacacggctttagtctagaagtcacacactggaggccttggggctgtgcccaataagaagacatagtagctacccagggatggtttcttcttcttctctttttctttttggtcaacatgtgtatatctaaatatcagaaggccctggcaaggctgggtttgcattctcgcatgtcagtaattacctggggctaagcttcccctttgaggcagctggccctctccagtttgcccagatcccgccactgcatgttgtctctcacatggtccactccattcatgaaggtcacctacccatcatctgaaggccctggtggctgcaacccctacgtggtttccatcacccttctttccaagaaaagtaagcccatagattctgcgcagaactgaaagaaaactattaagttaggaggctgccgttaagttccttccatggtttggtgagccagcaatagctctctaccttgacttccctttctgtgaaatggggatgcaatcaatcttcacgtctggagtacaaagagatgccatgaagaagcacatttactttgaatgctctgatctcgttggagagcaggtaacataaaaatccaaggtgttattattagatagtaagaaattttgttccatgctaattaaactcacaccttaccacttccacacggggaagaggcagcatgacagcctgacatgttaggagcgggaagagttctgcatgcgagcacaagacaggctgcctcctcctcgccgcgcctggccgtgatgtgtgtgtaaatctgccttccagctccttcctctcatccaaccgggactccgacatttgcagagaggctgatggagctctcagctctgcacagagcattgactgttctccgcgcgtgttaagaagttgtcaggctggggtcaggcaggtgaagatttagtgaagcagccaacaaagtttccccgccattgggttgccaccacttatggaaacgcctgcagaacgcaagcgagaaaacagatatttctcctgcgatgactttagcactcctttggggatggggacattaagtcttcctccaccgccaggaggctgctgacagggctgcctcccgaagacttggtagggggcgccttgaaggagagtgggcgccagctctatcgatccgattgccctattgcaagggacaattgcaggagaaaacagcgggttttttttctcctccttattccagggccaaagaaaagactatccatggaaggtaatgtagctgtcaccaaggagagagaagcggaaattcacggttctcttgtgaggcaaagacatctgtgttattgcaccctaagccaatagtttttaaaacaaagtcataaaacaagctactgtatataaaagaggtggaagctatgcagggctctcccctactctgtgcagggatttgaaaagaagcaaaccttaaaagaaaaaaagcagaatgaggatgactgactacagaaagcctgagggatgtgggtggagctaagaggtggtggggtggcttccctccaacaggaaggatgcctgcttgcactcaggagggagggtttgggggcacatgaagagtgaggagctggacagaggtgacacccaggcctccttcagctccagcccaggagagggtcagggcatatgcagtcccagagctctgtcactgtcatgcacacactcacctgtgctgagcacccatgggcatactcagcttccacaaacatctacccatctgatttccaaaaccacctgggagacaggccagatggaattaccgtcctcattttttttttttttcagatgaaagaacagcaacttggagagatcctcctagttggccaaagccatggtacaggtcttctgacctaaaatccagtgccctattttttttttttaataaaaccttctttcttcttctctgtcaaggtaggtccatcagcctgagtctaaaacccacttaactccagtggatggtgacatgcactaggctgttcttgccaatcctatagaaagccatgtgtttggccctcatggccattgtagatcaccgggacctgctagaatcctactacagcctgttggcagactgtttcttggatggctggactggaaagacttcaccaaatgggccaattatctaaatggtgagttgctgttctatttatttctaagggatacagtttgggccctagaattacagaattcagaatgggagggggccttcattcaacttcccatcagcataagaatcttctcccaaagttcttgactggtgatgctctggtcttcctgcactacagggggcatggagcctgtcctatgcacagacctggtgaagggcaccagccacccttttgtaccagatattcccaccgtgtgtcctggccacgcccttcattgcactgggatgatgcccacatgtaccaatccctatactggccagtgacctctgaccctgcagcaaaagataagctgaaccactgtccttccaggaatgggagctaagatcagtgtcagagggcaggggacttccaggttgtgggtcagtttcaggtagacagagccacactggcaagccaacaaccaatgagagctggggttttgaggaatggaaactgtgagaaggaaacaaggctagtgggatgcagggaaggatgcagtagacccatgccatgtggctggcctatgctagcattgatcatccaggtcaccaccggggtctgaccctagctcaagtcagtatgaacaggggcagacctgcggtatacggctgcacaagctgtgcactgcacaaattatgacctcttctggttggcaacattatgggagcctttgcctggcttccagaacccaggctagaggtcacacactggagggttgggtttgagctcagctctgcctctgactgggtggcttcaatggaaccctgcctctctcagggctcagtgctggctgcctgtgaaatagaatagcaatgccagtcccacctgcctcaatgtgctcaggagatgagaagattgtgatgagaaggggcttttaacataaaagccccatgcaaatataaaagttatcgttctttaaaaaatgttctgtgatgtgaagagtggacgtggattcatcagtggaaacaggaaatgggtggatgagtcagctgggcccgggtggacatagttcataagggaaacacttgctctccggcattgggaaaaagagtgtggatggctctcagcagccagtgccctcctcctccaagtgcagcaagtgtggccacagctcataggtgccccttctcgggataaccacctctgccatggaagctgccatgcctgggaagctgtgttcctgtcaccccctcctagggcagccacagccacttaccggctgagatgaaaggccaggcccttcccgccagttgcaggctgtgctccagaaccctctcccagtggagccaaagtgaggctttccctgagaccgtgtcctgatggggtgtttctcaagccctatcctgcaccctctatctctttttttatttttattttttagaggcaaggtctcgttctgttgcccaggctggaatgcagtagcaggatcatagctcactgcagccttgaactcctgggctcaagtgatcctcctgcttcagtttcccaaagtgctgggactacaggtgcataccacctgtagtgcctgactctccctccatctcttaataggccttgcacaaagatactccttcagagctcatctcataaaaatccctggggcaggccctacttcaccagagcccaacgtacagcggcagctggcagagaagtgagtgcgggagcacttgattgaatcttcatgtagccaggccctccacatgcctgagccactgtactggggcatagggtaggggagcctggaagcaaactctgcatcctagattcacatgcagacatgtccttaagaggggtccctgaatccaaatgtccatcaatgatagactggataaagaaaatgtggcacatatacaccatggaatactatgcagccttaaaaaagaatgagttcatgtcctttgcagggacatggatgaagctggaaaccatcatcctcagcaaactaatacaggaacagaaaactaaacaccgcatgttctcactcataagtgggagctgaacaatgagaacacatggacacaggcatggggggcctgacagggggaaagaggagggagagcattagcacaaatacctaatgcatgcggagcttaaaacctagatgacaggttgacaggtgcagcaaaccgtggcacatgtatacctatgtaacaaacctgcactttcagcacatgtatcccaaaacttaaagtaaaattaaaaaaagaaaaaagagggaaggaggaaagtactgagcagagggagaaggtgaaccgggatgcaggcacacgtgaggccttggccagtcccacaggcagctctgaactgaatgtctatgtcctctgcaaattatatgttgaaatcctaacccccaatgtgacggtatcaggagctggggcctttgggagggagtaggtcatgagggtggagtcctcgtgagtgggattagcgcccttataagaggccccatggccaggcacgatggctcatgcctgtactcccagtactttgggaggctgaggaaggaagatgacttgagctgaagagtctgagaccagcccaggcaacatagcaaggccttgtctccactaaaaataaaaatatcagctggacatggtggtgaatgcctgtagtcccaactactcaggaggctgagttgggagaatctcctgagcaggggagatggaggctgcagtgagctatgatggtgccactgcactccaacctgggtgacagagcaagatcctgtctcaaaagaataaataaaatacaataagatacataaataaaagaggcgtgggagagctccctcatcccttctgccatgagaggattcggagaagatggtggtctacagaccaggaaaactgttctcactagacacggaatctgtaagaaccttggtgttggacttcccagacttcagaactgtgagaaataaatttctgttgtttatcatccactcagtttaaactatttttttaacagcagctaaaatgaactaagacctttggaagggccccatctttgcatcctgtctcaaccagtaattgggtgtaggctgcccccagggcatggtatgaccttggggagccagctttctctagcagaggtcaattcttagaaggaattcggctgaaagctgtcagggaccagccttctcgggagccagagaatgcatctcttgttcctaaaggggtcatctgcatggtgtagctactatgtccttccatcatggggcaagcagagctttccctcagagtcaacttatctcaagcataaaggattcggtttttccaacggaatttccaaatcattgctgggtacctagtgctgtacaagtgaatccctcaggtacgttgcatctgcctgtgaagagaccgctatgtgggaggagaggcaggcaaggcacggcttataccttggccacagtgactgcatgtccgcccaggccattcctccccactccgtccccaagctccgtggacctacctgcctttataggttgtgaacccagaaaatctgagataggtctcggttaatttagaaagcttatttggccaaggttgaggacgtgcccgtgacagagcctcaggaagtcctgatgaaatgttgcccaaggtggtcagggcacagcttggttttatacattttagggagacatgtggttcggtctggaaaggtgggacaacttgaagcaaaggcaggaagactggaagtggggagcgagcttccaggtcacaggtgagacacaaacccttacattcttttgagtttctgattagactctccaaaggaagcaaatcagatatgcatctatcccacagagcagaggggtgactttgaatagaatgagaggcaggtttgccccaagcagtttccagcttgagttttccttagcgattttgggggcccaggatattttcctttttcaaggtgctgaagggatcccaagaagcgagggactgattttttttttttctcagccccattgcaatggaattttttcattgttttcctcatgttctacctgcaggagtgtaccctgcaccgcttcatgcaggacattctgaagagtgtgagaagcaaaaaaagaatctttgcaatgtatattagtaacatttaattagccttggattacttattaagtgacaattatccctattatgcctgtcacagatgagcgactacatactgtctatggtttatgggcctaaagttctccacggagtgtcacaaattcccattatgtccccagcgctgggctttgcatttggaatgtgagcagaggtgaatcgtcccctttgcacagccagatgtatccctgttgacttggcaatgaggcagggtcgggccagccttccttctggtaaatgcagaaaactcattagcagacacactgttgatggggtgccctggctggcggaaggggattgagccattgaaactggacaggtctcctccccaggcatcatcctaaattctagtctcacagatgtcacactggagggcctctggagatcatatcttcaaacctttgaatttgtcgctgggaaatcagagttgcagagagcatgtacggtgtgtctctggaccacagctgcatccctgaacattcccactatgccagaggcatgccctagacacagaatcctggacacctcgctacagaaaggtcctttttagccaaatgtccaaatgtcccataagccacattccctctctgtgacctctttctgacaactccctttccatagaagctggagatctcaggaatatgtagacagctaatgacctcccccatcatcaccaccccaaaagtcactgtgatacatggagagatgggcgccatattcctcaagttctatggtgcatgaaatcctgcctttagactttttatgtggaatatgtcatactcttttttttaatattttttattatactttaagttcagggtacatgtgcatgacgtgcaggtttgttaaatgctcatgatcactggccatcagagaaatgcaaatcaaaaccacagtgaaatatcatctcacaccagttagaatggcgatcattaaaaagtcaggaaacaacaggtgctggagaggatgtggagaaataggaacacttgtacactgttggtgggactgtaaactagtttaactattgtggaagacagtgtggtgattcctcagggatctagaactagaaataccatttgacccagccatcccattactgcgtatatactcaaaggaatataaatcatgctgctataaagatacatgcacacgtatgtttattgagccactactcgcaatagcaaagacttggaaccaacccaaatgtccaacaatgatagactggattaagaaaatgtggcacatatacaccatggaatactatgcagccataaaaaatgatgagttcatgtcctttgtagggacatggaatatgccatactctttaaagaatgtatactgtctccaacacaagccatcaactctttggcataaacgagctttcgaatttcctctgtaaagtgcattttaaaacaccaaggtctaagaaaagtcagacatggggccaggtattgtggctcatgcctgtaatccatcactttgggaggcagaagcgagtgtatcgcttgagctcaggagttagagaccagcctaggcaacatggcgaaaccccatctctactaaaaatacaaaaattagccaggcacggtggtgcatgcctgtagtccagctacttggcgggccaaagtgggaagatcgcttgagtcccagaggcagaggttgcagcagtgagcctggattatctttctcggatctgtgagccaagatcacacgactacactccagccagggcaacagagcaagaccctgccttcaaaaaaaaaaaaaaaaaaagccagacttggagaggggacccaaaggtaaatcagggacagtcccaccctgggggagaaactgaccaagatggggagtttcttgcaggcttcccaaggagtgaaggaggtgggcaaaacaaggatggagaatgagcagccttagaggccacatgcccctggcgggaggtgggggagaaaaatataagctggggaagcatcctggtagtgtcttaccatctgaccattttacacaactgaaactcagagcttttgtacaagggcagccaaaacagatttgcaagttaaatgtaaacaaaaccacaaaactattacatttaaatagaaagtattacaaaacaatggaatttaaatcagcaatattaattcagcacaacggatttgtcctgttctgacgtaaaaggctgttcacagtatgtgagtggcaatcagggccacccagtgcactgtgtcctgtttggccagccccccttggcatgggctatggtctgattccctcacttaccacagtgaagccttcacacatccagccactgtgtgccaggcggcctatccttggacagaacacatcacctattcatagcaagtctctctcggcaattctcattagtctgcaacaactgggactgcactactttgccaaactgatcaaaccataaaatcaaacaccagctctgacatcacatggtggcattcaggctgggcttccataatccttgtaaacataacattatacaattcacaaatagtaagagcttatgatctaccagttaaaagctgagacatagagatcaggctgaaactctctttcatcactgccatgaacttcatcccatctaagtacaaccttgtccaaagcagaggcagatgttgcaggattttcgggatggagtctaaggcccagaggcctggggtggagtcatcattctaccgctttgtgctgtgtggtcttggcgagtcatcattctgccgctttgtgctgtgtgatcttggacaagtgacttcacctctctgtgcttcaactcctcattctgtaaaataaaactcagatggtaactgcccccataaaatcgctgcgagcatcataggcatgttaatgtatgtgaaatatttagaacagtggctggcactatgttagcacatgtaatgtaaataagcattactctcaggttgatgtggctctttctagatcatttgtacacatttactaatgtgcaaatatattcagtatgttttgatgttttaaaaaatatttaaagatgcaatcatacttcctgaatcattctgcaactagcctttgctctaaataatccatgagcttcaatatttcctccccaacacatcactacacacgtgccaagcagatctgaaagagcatttgaatgggtgcggcagtccacacctgtaatatcagcactttgagaggctaagctgggaggactgcttaagtccaggagtttgagtccagcctgggtaacatagtgagactctgtctctaccaaaagatacaaaaattagctgggcgtagtggcacgtgcctgcaatctcagcactttgggaggctgaggcagggggattgcttaagaccaggagttcaagactagtgtggcaacatagcaagaccctttctctataaaaaaataaaaaataaaattatccgaccctgatagtgtgcacatgtggtcctatctgctaaggaggcagaggcagtaggattgcttgagcccaggagttcaaggcttcagtgagccatgattacaccactgcactccagcccgggtgatagaatgagatcctgtctgtaatccgaccaaccaaccaaaccaacaaacaaaagcaaacatatagagctgagactaagggtggtgctggctcatcctccgcctgctccactggtcctctctggcctagcctttcagagcacagcactgcagtagctctctctgctgattctgccgtgctggggcctccaagtgccttttacagcacattaggaatctggcaccataagcactgaactttcctaaactgaagttcattttaaatgcactaaggcaaagaacaattcagaggaaacttagcccatctgtgtgtgtgcgtgtgtgtgcacgcatgtgtgcatgcatgcaagtatgcaaagagtcccctgggaattgctctagctcatgtattagggcacatgtggactgtgtattgtgagagcagagctacctacaatggcagccactgtatttttcaatattaaaaaccactcctggttactggcaaacagccaccttctctgctgtggaaagcctcatgccctgggctcctcaccttacctaatgacaagatatgcacataggcaacatgtttggaggatggcaggggctgaagggattatggctagagcaccgggccagcagcccacctctcctccacagaagacagagcagaaagcatggcggcaggcatttaactctgcacttagccgctgctcattaacgagctctctggtggaagtctttgcagctactctctggcactggaggttttgtcatcccacccacgacaacctctgttagtcaataataacagcttatttaaaaatagcagcatcaactgtttgcactgttattatctgtgcctggcttctagccccagaagacttgggaaaggtgtgcgacctgcttttccggagcttctcttgctgaacctgtttccagatctggggaaaagacaggcacatctttagcaaacactcacaatgtaattgccaggcagttatgggctgcgacagtaaaatacagcagttggcggcacggtaggttcattagtcaataaagcattgccacgcgttttattgaattgtaaccctattttgccctgatgcggaccttgtggagcctctaccttcacataaatctgagtgattcatttagcattcaaagtcgagtaaaaggaggatttggtccaattccaatgcaaccctgctccattagctatctctattattatctgcctttgcctcctccgtcagtggggacattttgataaaagcttacatcggaaataaatcagggagtgaatggcaggacatgaacaaaatagctttcctataggccactctgtccctggaatgcccaggaatggctcagggctggtaaggagaccgagtggacgattcccctggcatccctgcatccagccatccaacccactcaagacgccgctggtaaatgtatactacgctcctatttttctaatatctgacttgaaatacatttgacatggtctacttaatgttagatagctgaaaaatattttattatttacattgtttatttcaggacagagatttagctctatcactaaaatgtccacccccaaagtgagcaggattctaaaactagaaaataataacagggcacaagtcaatgttattcattccatatctgtgagaagtaccccaaataatttgctaattttaaaaaatcatatctgtttgcaagcaatattctcatatggttgggggatctgggataatcagagcaagaaggtggacttacaaattgtagggagtggaaaatagaaaaaagatttataaaataatatgaaaatatgggtgctgatgagaaacacaatttttacttttagaaaatggtatttttaaagtgtaagaaatgcaaaattgattactgagatctaggatcaacgaccagctatttttttaaaaaactggccaaaaaaataggaggaaaatactaaaaattaaggcaaattcaaaagagaataagatagaagacaggaatttcaatgacccaacatcaagtccatactctgacctgcctgccccactagaaggaaaatgagcatatctttttacccatgccttgtctgagaaccccaaagtgtccagttatttctgagacttgaagacagtgccccataatcccatggtggggtgctgcttggctttttaattatgttaattacatgtttgcttccttggagtttgaggccagtggtcccgttcagcattgcaccttatacagaaccagtaacagcagcatcgggggaggaagcatcagttaagggaaccacaggtgtgctatttgtttccgatggccttcctcgtctcctgatagctgacagttcagcaaagggaattagtagcacttgtgggcaaagaaccgaagagactctttttccctattcgatgagtgccatatgaaaggttgtttccgtagcagctcagagccctccttgctgtctcctaaagagaagcctgccaagtcggggctgtgggttttaagaggtacaaacaaaggtggcatggtagggcagaccagaggtgcggggactcaatgcagacttccccatggtttcagggtgtcaatttccaaaatgtggtccctgctctccttcccgccagactctgagaagcaaaccttgctggcaggaaacctagccaggagtggctccgttccctggcctcttctttttttctgccacgtgtagccctgatgcccataactaaaaatcacgttcataatttaatttggggggatcggttgccaaatgctcattaaacaattgggtctttgaaaatgctatctttagattttttttaattgacctattattttctggctctagctgccagatcccccaccgcaaacaaggagaagcttgctacctggactttctttgatgaatagttttaattaaaaaattctgtaccataagtattttaatcttacaaacataccaaaggtatgcagtcataaatttacaaacacatttaaattaatctataaatatgctgcaaaattgacaaggcatatttaagccgaaggatgcaccatagatgtgctaataatgacaattaagaatcgtgtaaaataaatgaaaatcaatactcagaacaggttgacaaaaaggaaaaaagggaggaactaaaacaacgtgtagtttgactattaggggaaaaaattagtagctgcttgtagttttgaaatgtctactaccgtgaaggaagggctcctggtggcatttttttttctcattctcgtggatcataaaaacgcccctgctggggtgacaagacggacctatttgggttgggtggtctggaaggaggagggctctgcttcaattctctaaacaaaatatacaccttgccagttacagatctgaaaggaaaccatccaaggtaagctatgtgcctagatgctgacacatggacacattttttttgcacatggtgatctgttttctgctttttaagcactgggacaagttgtgggggtgtctgtgctccaggaggcaggagtattttgtggccaagacaggtaactacctgtgctataggcatcacgggtcatccactcacaggagcaagaggtgctcaggagcacctttgtgtctcccggcagaaagcaccaactgcaaagagacgtgagtgtgccgctcccactaattcacagagtgccttgctgtgccgaaccaggaaacacacgctaaccttcatggctacattcatattaaaagacaactttgcgtctttcaatcatgtatttccctctaattaaggcatattcactttttccccctaattaggtattctttgttgcataatgtttgctctaatctttcggaatctttctcaatatccagtcattacaggctcccctcgaattcaaccaaagcatgttattttttctgctaattacatcctcatttacagattggcgcctcctctgattggctctgcgcaccagttgctatgacttcattagtcgtgtctcctgaccctgttatttcttgtgacaggacttgctcctcgtgtcctgtggctccagatccctgggtcacttctcaccagggttgaaatagtgtcaaacacacgagggtttagggtgcgggaatcagtgctgcagttactaattactacacacagtaacggtacaaattactgctgctggctgggcctttatttcctcctcttttttttaaattaatgttttaaaggtgtcattagcaggttagtttcattttaaaaatgtgcctgattaaaaaaaaaaaaaaagcgaaatgtgtctccctgccagggctctttcacatacagaaccccaaaagctttagttttgtagggggctgccgcctagtgagcacagaacttcagctttggctcaattaccatcaatctcaaaaatattgaattttaaaatctcgaaggtggtgctaatagaattttctaacccaaggcattcacacatttaaaaaaaaagaaaacaagcgaaatttttaaaactatacaaaatttcaacacacgagcgtaaattgtatttattaaataacaagatgaagctctctaggtaaccacatttaaaaaaaaagaatgtagctcattagatgagttatgtatattaagggataattaaaatgaatgaattacatttgagtaccaatgctatctttttaacaagcagaattgggtaacaggacctgaacatttagggggtgcccaaggcagagagtgtgtgtgatcctcactttcggattctaggccatcggaatatcccagtttcctggaatcaaaggtccaggaagagtcaagcctgcagagtttaaatgcaagttagttaatatgaaaaatgctgtatctagttgtttgcaaaattacttttgttgattaaaaggctcttcagaacttccggctggtgaaagggttttaaattgtctaatgctgattgtgattgctatgcagaaaaaaggcagtgcaaagcaaaccattatatcactgaatctttgttaagcaggccttgaaagtgtctgacagcataattaatcttgtgatattaacaaagaaaccaactcaatagtattgaagatgcttattaaaaatactaaatacctttttccacttaaaaaaccttttgaaacagtgtgggaagtggcattacctttttgtttttgcagcattttcaactaaaattgatactagggtctacagcgcagcagcaaaattgtgaagtggacaacaataagaattagtttaaaaaaccataattcccagccaagaacactggctgggctcatcatcctggcagccgcaggctccgacaacaccctttgcagaaaacccactttccaaagtttaggcagaatgaatggttggtaacaaaaatctgcaaaatatgagccttctacacattgttattttcacttggggatctcaagtgaaaagaccaagtgtatacaaccatttatgtttccaaacagtttgagaggcatgggacatatgtggattattcggggttcttttttgtgaaggcagggtttgcaagccagctatttagggcttcctggaccccctggggaactgaaccatgtccatatcttgggaaaataactggggccccgacaaacctcagcactgtatctcacttattctggcaatgtgtgagtatggcaatggtgtcctgtaagctgggcgagacactgggggtatgggcacgggccttggtgagcaggggtagaggagaggattcccctttgatatggtttggctctgtgtccccatccaaatctcatcttgaattgtactctcatagttcccacgtgttgtgggagggacccggtgggagatagtttgaatcatgggggcggtttcccccatactgttcccctggtggtgagtgagtatcacgagatctgatggttttgttggggggttctgcttttgtatcttcctcatttcctcttgccaccaccacgtaaaaagtgcttttcacttcctgccatgattctggggcctccccagccatgtggaactgtggatccatttgaatctctttttcttcccagtcttggttatgtctttatcagcagcgtgaaaactgacaaatacctattggcagaatttttaccttggatggtgactaaagagagcattaatatgtgacacatttgcaattggcaattgctgtgcaaccaaactagtaaccacacaatgcaatcacctgaatgcctagagcaacagcatttatccagattacatgtctgtgggatgacctgaagatcggcaggtcttggctgggcagttccactgattttggttgggctggctcgttcctgcatctgcaagtcagctagactagcctggtggaccaggctggggcagttcagcgccatgagtctctcatgctcactgtccccagcatggccttctcatagtcatggcagaagcacaagaaagcaagtgaaaacccaggaggctgcctaaggctgagggtcctaactgggagtaaatgttacattgagtggccaggacagagttaatggaacagaaacactttgggaggaagtcacgaataggactgaaaggcatatgttaacacatttggatttatcctgcttccatcctgcacttttcttaaagaaagttttaacacctaattataactcaagtcttctgcaaagtaaaaatacgaggtaatttatttactttggtattaaggagaaaaaaattagaatgcagtatgggttttccacaatgtcagtagttaaaagagagccagttagaagagaatgggttggacaatgttttaagccttatcattttcagatgacttgatcattcaccaagcaagcacacaaacagaaaaatccaaactcaacagaaaaattcttgtaatgaacaataaagttattttatttgtcaattatctctcaataaataagggaaaattaaattcagcaaaaatgttggatagaacatcaaactacaaaattcagtggtatttctttttatcaaccataaccaattaggaaatataattctaaaatataataccgcttacaatagcaacaacatataaaggatacagaaataatacttcaataatcctgacagataacaatataagcagatcaactatcctatactaaatctatatctttaattcaatctaaatgaatattccagttgggatttgaaaaaaatagatgtttactataaaatgtacattgattttaagatcgctctaaaatttggtaaacatacaaaatagctcattaaacaataaagaaaatcaaagagggaaaaattgctgtatcaaatataaagtcatattacaaagtcaacacaatataaacagtgtggtattgtcaaagaaaaaaataaactaataaacaaataatggtgctgatctagggcaagctagactagaccactctacagagaaatataaaacaggatctctacttaatgtcacagttaaatgagctcaaaattgattaaatgtgaaaatgtgaagtgtaaatttgaaaggtaaaaatatataattattagaaaagaatacagtgtctttatgactttttaaacagaacttcaaaaataaaaacaatagaccaaaaaactttaaaagatttgatcacatgaaaattaaggctttggttcaatgaaggacaagataaagttaataagccaatgacagaatgggagatgattttgcagtattttcaactgaaaagggattaatacctagacagtaaccccaaaaggaaaataccaaataagatgttcagacaatttatttatttattttaattattgttatatatatattttttgagatggaatctcgctttgttgcccaggctggagtgcagtggcatgatctcagctcactgcaaactctgcctcccaggttcaagcaattctcctttctcagcctcccaagtagctagcactacaggcgtgagccaccacttccacctaatttttgtatttttagtagagatggggtttcaccatattggtaaggctggtcttgaactcctgacctcaggtgataccccccttctcggcctctcaaagtgttggcattacaggcatgagccaccatgcccattctgttcagacaatttataaaattatacttatttactacaaaagttaataaatataaaaagagagaccaaaaatcattaatagtcagagaaatgcaagttgaaacaaaatgatacgactttatacctaaaacatttgttaaaaaaaaaacctggactactagaaaatcccaagtgttcacagggatgagggaaggtaggacatttctgtggggcttgtggagtgctggctgtatcccatatccaccctggagggcagctgtgactgctttcagtgcacacactatctgcaactcaggttggttgcagagtatgcagtgcatgcaggaaatttcccagggagcatgttcagaattaacattcaagagagtgaaatcggtagaagttgaactgaaatgcattcaccacagaggcctcagctattccattatcttttttttttttttttaggcaaagtctcactctgtcacccaggctggagtgcagtggcgcgatctcagctcactgcaacctccacctctcaggttcaagcgattctcctgcctcagcctcccaagcagctgggactgcaggcgcacgcctgcacacccagctaatttttgtatttttagtagagacgggctttcatcatattggccaggctggtcttgaactcctgacttcatgatccacccacctcggccttccaaagtgctgggattacaggcatgagccactgcgcccagcccagctattctgttatcttacagggagatctggagctgggatggcccttcagagctgtctaccattccccaccagatacaaagaggcaagtcccaggacctagggccaggacctctctgagtcccctggagaaagactcagttgagagccattggcagcagctgaggctcccttggtcttgaactggatggcttggtggcccaaaattgtaaccaccatactctatgatccaggaattctaccacttgaaacgtctcttcaggaagctctcacagaggaccgcaagaggcacagtatggatgctggtcacaatattaattgttgggggcaggaattggaagtctgtatggggaaggtaagtaaaatgtgaaaatgtgtagtgattcaaagtaatggattatatgttcacatagcaatagggaacttatcatttatatcagttaaaatacatgcacactaacaatatatgccggtcaagaacacatacaaggctggatgtgatggctcattcctgtaatcctagcactttgggaggctgagctcggaggatcccttgagcccaggagttggagaccagcctgggcaatagagtaagaacctgtctctgcaaataataataataatagccaggtgtggtggtgtgtgcctgtagttccagctactcaggaggcagaggcaggaggattccttgagctcgggaggttgaggctgggcggcaaaacaagacctatctcaaaggaaataacacatactaaagaatagataagcattaaacacactgcaatgattgtctacagagggaagggaattgggttaaaagagaataaataaatagacaagtcaaaaccaaggaatctggctgggcatgatggctcacacctgtaatcccagcactttggaaggctgaggtgagcagatcacctgaggtcagcagttcaagaccaccctggccaacatggtgaaaccctgtccctacttaaaaaaaaaaaaaaaaaaaaaaaagttagcggcatgtggtggcttacgttgtattcccacactttgggaagctgaggtgggtggatcacttgacgtcaggagtttgagaccagcctggtcaacatggtgaaactcagtccctactgaaaatacaaaaagttgactgggtgtggtggcacatgcctggagtcccagctacttgagaggccgaggtgggaggattgtttgaatctgggaggcgaaggttgcagtgagccaacatcgtgccactgcactccagcctgggcaacagagtgaaactctgtctcaaataaataaataaataaacaaacaaacaaacaaacaaaaacaaacaaaaccatgggatcttgcatagatcaatgatgacaatgtgttctaaactgaggattacaatgaactcaaacctctgcacctgagtcccaggggaaaaaatcatagtagtgtcagaaatttctatccattatttaggttaacctcagattattccacatacctttttttttttccacacctaatctgcagtaggtctcctagagctgtggtccagctgatatatctattttttaggaaatcagggatgattttccagatgttttggatagatgttttcatatttgaatctaattaagggtttgcaaaagaccacaacaacaaaaaacttgtagaaaaaggtttacattctttcttcactctttggatttggtttgaagagaacgaatccaagcatggggtttgaaaagatgttgccgatggaagttgagcatggaggaaatcaggagttaggagaagggggaagagagcactgcattgctccagccgggtggagggtgttcctggaggaaacacaagtgaaaagtgaagttttacaatgaggaggagaaacaaagttaaagagatcctcaagtatttttaaactgtgaaactgccaaagagaatttgaggcagaatgtacacagtccacatggggaaatgttttttatagaaaaatccagtttctaggatattcttatcacagggctgggaggcagagaacagattcagaacaatggctttgtcgaactcttaaagccaagagagtccagctccttgtctgaaagtctgtactcctgaaagtaagaaaatatatacaggaagatgcattaagaggcagcccaggttccagtaccaacagtcacagccctcctctgttccttccgcaagcctcactcttttttgagcctcagcttgaccatctgtaaaaggaaaaggtcaacttttttttttctcaacttttaggaactgatgcaaaagagtgatgtaagaaagtgttgataaaatctctgccccagctgtcaggaagctacagagaaacagctgagtcccatcatgtaagcaacaaactgatggtattctttgggaggaggagtaggatgagaaggagggggaggagagagagcaagaggagggtctgggtggtggtgggagaagagaaagaagaggggaaataaaaataatattttaagtggagtggctggtgatatttgtcattctctcagtcggttatagtgtgagcatcttaccacccttgtgtgagtgtagggtttttaaataaacaaacatatacacatagattttctattatatgacctcaatgcaagtcagctacatcatctgccgctcagtggaagtagcaacaatttattccaactctggagaaaaagtagccctgttggatttattgaaaattgacatatctgtacacggacagaaaactggatgatttaaggatttttagggcaattttgatcagatgtgatttcatttttaatttacatgcattattagacatgtgctattacaattgtcccagcatcagatcacacttctttatgaggcaaagtccacctgcctttatagagatcaacattttcaaatatttttctatcttttcttgaaaagagggaatagagacatgagtctttaaatgaaaccttaatgaagcaatgaagtggggacttcaaggaatccattctgcagagtgcagtggcagcaaactgtccacaccttacttcctaaggcaccaatagcataatgagaacaccagtgataggtgtgtggtgtctgtggtgttggcagtataggccgtgtgtctggactcagttgtgtgactatggcacctctctggagttaagtggggtgtccttctcagtccaattgccatacctggctctacaagccttctggataggaaggttactcaaaatctttttagtatttttttttaaattctaaattagtctgactttatttctgatgcttggaactaagaatctattcagactttggaattcaactctcatgcaagatgcaaaaatacttctttaatgtttggtttattcaccaaggaatccatctggatttgcagttttcattgtgatgagttgtttaattactttgttgttgttgttgataataaatagggctatttaaattttgtatctattcttgtgtctttggtaatgtataacttttcatgtcttttatttcttctaagttgttgaaattatttatattaattttctcacaccattcctttattatcttttaaatgttgatagaagatcaacattaaaaaggggatgtaccctctttcattactattagtctccatctgtgtcttctcttttattttgttcagcatatctagaagtttgttgattttattaatctagtcaatcaactttggtttcattgatttttttctatagtttgtatatttatattttattaatttctgcttattatttttctacttatttggctttaattttcctgaattttctagtctcttaaggtataagcctatatcttttattttagacctgttttttctaatgttagcatttaaggatatagattttcctctaaagaattgctttagctgcatctgatgaatatatatgttgtgttttatattcactcagttcaaactgttttggattttctcttgtgacttcttttttgatccatgagattcccagaaatattttctccaaatatttggggatttttagatctctttgtttattgctaatttttattatattggaaatatatcctgtatgatttcaatccttttaaatgtatgtacactttttctaatggcttaggatgttgcttatcttggcaaatgttctatgtgccattgaaaagaaaagcattttgctgctgttgggtgaagtggtgaagtgttcaatagatgtcatgtcaattaaatcccactgattggcagttttatccaggatttctgtatccttatagattttacattccttttattaatttacattccctctattaattacaaatctgtaagaatttctgtattcctatagatttacattccttctattaattactaagagaagtgttgaaatcttcaactatattttgtatttgtctttttttcccttttaattctgccatgtttgctttaggtactttgaggatttttctggtgcatacatgtttaagtttgttatatgcacatatatattatatttatattgagatttgagcattgtgtccttatgaaatgtcttttttatctctggtaatagttattgtactggagtctactttgtctgatattaatatagtaatgccagtctcataattagtttctgcatcacatactttctcctatcgttttcttttaaaccatttatatatttatttttaaggtaagttttctgtagatatatattaatctttggtattcagaaacaaaaaatagaattccaaggaaatattgggaattccttaaattacattagtctgtatttttcataacacttttttgctaaagtacctatttgtaggtaaatttttttttcagtaacataaaagtaatctctacctgacatagacatttgagaatagaaaatattttaaaggtgaatattaacacaaaataaatgccatgcaaaaatcatttaaaattttgaaaaataataccacaaaatttaataccccaaaggtatcattaaaaaatgaaaaatacacaaagaattaattgtcttatgcactagtcttttctcttttttcatgacaaaccttacaaatgtggaaaattttcattcatttttgcattgatgttggttgaatggccaagaatgtacctgaaagcatttgtaaattaggctttagggcacatgtttcttcatatcagattatatcattttttaacaataaaaatattttgtgtgcttgccttgattttgatttttgctaatgaaactgatattctttttgcaattcaggttttagatcagtttctaatcttatttcagagtattccacaaacatgtgtttacagcctggcaacagctatgactgagactaaccgaggaggttatggttactcttctgcctgctccttccctggtttctgtaaatgtttatcttaaccttagactctgcacattagtggttcctgttcatgcttttgagttgacatcagtggattcctcaaaactactaggttggtgcaaaagtaattgcggtttttgcctttgaaagtaattaaaagaaatgtctatatttatcgttaaccttgaatttgcatccaagatttatacttttttcattttcccaatttcttgactgaaatataaaaatctcccaaaatgcagagcaggaattttcacaggaaaacattaagcatgtatttggtcttgtttcttcatcgagtctgttcatctctggcttttaattggtgtgttagactattatatttattataattattaatgtggtatttcagtatttattttctatttctcccatctgttctttgcttcttttcctaccatcttttgaatcaatcgagtattttttagtattccattttatttttaccttaggcttatcaggtatacatttttcttccatttttcagcaattgcttatggcttgccatgtgtacctttacttctttaaaggctgctttgaaatactattatgttacctcaggtttaacataagaaccttaaaatagtatcttccactttctccttcccgtcctcccatccattgtgctattgtgcccagacattttaattctgcagacactttgaactacactactatctatatctatatctttttaaagttatcctatctaaaaaaaaaaaaaaaaattgaaacctatttcatgattactcacttattagccatttctggcagtgtgtttactggagttgctgaatgcgtgaggcattcttcccttaccagtccgaaagttaaaccagttaaactctgccattttgcctcttagtgggcatgcttaagcccgcttgcccaattcttgatcttatcaagaattgacagaatcttatcaagaatcttataagatcccagttcttgagatcttatcaggaagctgctgatcaccagtttcagatgtttctgtccatcaggagactgcctttccctggcacttacccctttttataaatctgtttcaatttggtgtcatttttcctctacccaaaaagctttctttaatatttttgtagcttttacatatgacattgcttctgcttgaaaaatgctcttcccccattacctgcatggtcagttccctcaatcctttatgcattttgctcgaatgttgcagtctatgtggggtcctttaaccacctttcaatactgcaatgctctgtccccatggctctctctgtaaccccgccttactttatttttcttacaacacttaacatctgacctgtttggtagtttggtttttgtctgtctccctgtcattagaatgtaagctccatgaggatggagctttatacatacttttttccacccatgtgcctatacaccccttcctagttatgttaccaactgaatgtacccaagtcacacagcaccaaagtatgtaagcggcggcgaatccatacgggtctgcagcaacctcagttcttgtctcctcagaagaaagaatccaaacgaagagcagagtgagagaccgaggcaagtttagagaaggagtgaaagtttattaaaaacttctcccctgattcttcccttgcggtgggctgtgcccatgtacagtggcccagtagcacttgggaggggctgcatgcgtggtgcgtttactggagttgtacgcatgctcacatgaggcattcttcctttaccagtccaaatgctataccggttaaactccgccattttgcctcttagtgctcatgcttgagcccgcttgcccaactcctgagatgtcatcgggaagctgctgatcagcaattacaggtgtttctgtgtattgggagactgcctttccctgtcattgatcaattatttttttagagagatacttaacaactacctcaccatcacttgatggttgcctgacattcctgattggtgagggagagagggagggagtcaggggggctctcctgccctgttcctgtctgactagctacctgctgtaacaattatactagtactagtgataaacctatcacttgtgcctatgacagggccttacacaaggtagataaccaatgattatggttgaattaataaacaaggcctctcttatgcccctaaaaatgcagagatgctcttctcacctctcattcggaatctactctcaattatatataagacggtaagattagtcaactcactctcgtcaggtggttaacgtgctagtggttaatccaatccaattacttgttcaaataattagacccatgctggatgtgttcgttcagctcagccccaccttctctgaaactatctcagaaccagtggctttggttgggcactggaagtacataaagaagaagacatacatgctgtctcagggtgatcgtgggtctctagccaggagtcagatgacatcaccaccatcacaagctggtgatgccagagaggtatgaatggggaatagagttgaaattcatatggaagtgaccagtggagttgtcggggaagttttaaaaagaaaataacaagtaaactgggttttgacaaaaaataacatagggatttcttttctgcatgtgagtacatatctaaagtagaaaagtataaaagttaaaaaaaatacacaattacttggttcaggttaatgcccacagcccagaagaaggctcagagccttctctgtgagtgtaaagtttatccaagccaccttggacaccatcacattctctgcttaagcaaagctgcttgtcagaggagtttctgcatattctgaatattcagggactctcctggccctacaggtggctcaggaaaccctagagaggaaacgcatcctcattggtgaaaggatctcacctggcttttgccgagggtgagcagtgtagagggagcataataaactctcatagacaacatctgatttccgacagctgtcccacttctgaggcttcgtgctctcagcgccgccaccgccaatgcaatatcctccagtttaaggttaggtaccagaaatatttctgccagaagttcttgatgtaatcaaaacgggattttcatggacttgcgtaattttaggatctgggtgaagaagccttacccagccccgctttgagtctggccctcagtctgtcacatagtgaaacagctcgacatctgactttgaagccaggttcttgggtcagttcctacctttgtgtatgtaccaaagaactccttcaaacacttcctttccccacccatctgtccccacagacatgtaccccaatgcccttaacttgttcctaaatgagtaaacaaagcttcggtaacatataaacatgatttatgaaaacaaatctctccccaaatctgcttagagaagcagtgtcacataactgtaagcaaagatgaaagaccacgattaacagggtccacatctgttcgggggaggatgcagcttgagtctctgccagcctctacctcaaagaatgtgtgcgctaggtcaataatgaaactcgtggcccatctgtccttccggtgtgccctgcactgtgctaagaacttcccatccactggatctcacggaggttcacagtcatctgaagagggggtcctgtgttcacctgcatcttgcaggtgagtggacagaagtgcggaaagcatgagagctagtgcagagaagagctggggcaccagcagtaggactggaggcaggacattgtctttggttactacctggatggacaaactacatagatgaagattaaaaaaacaaacaaacaaacctgggcctgatttatcaaattgggatgtctccattgatccagttgcttgcatcatgtgttaattctcttctgttctctttctcatgtaagcaccacctgtcttccacattatgatgcgaagctgaagattcaccccactaggtcaatggggacactaattggggaatatttgaggtgcagagaggaggtagatgctacatcctgtgaacctcagtaagggggatgcctctgtgtgtagggatgtcaaggccctggccccgtgtcatccccagataagccccatatcaccctgggagctctgcaaggacagaatccatgtgacattttgggaacttctaagatgctaatcagaggccttctcctctgagttctcaaacaaatgagaagtagacccaagggtcaagggttgatgaaaatagcatggttgtttgcagagctggattggatctgcagagagcccaagcctccctgtcttcctctgtctagtctccggccactgacagagtccaggcagagacagaaccaggccgtagacttgctgtggggaaggatatctgtcacatggaagcagaagccaacagcatctttcccctgtggtccctaaaggaaaaattgaggcagaccacagggaatagcaactctttcgtagcttaagacacccatggacatcttctcatccttcccagcagctgtccttcaggaaagagggaatggagtgggaattttccccccaatactttcagggaagaagtcatcatttgctactctctgaatgtttgtgctttttccccaaattcctatgttgaagttcacccctaaggtgacggccttaggaggtggggcctttggaaggtgattaagtcatggagatggagtcctaatgcacaggattggtggttttataaaagaggcccaagagagatctcttttcttttccaccatgtgagaacacagcaagcagtcaccgtctatgaactagaaagctgattcaccagacaccgaatctgccagcaccttggtcttggacttcccagcctccagaactgtaagaaataaatacctgtcatttgtgggccacccagtctatagtatttggttatagcagccttaatggaccaaaataccattcctgtgcccatcagcagcatgaagaataggaaatgatatcttcccactgtaggtgtcactgttgacctccatcacaccttcttgcatccacacccttgctgtggcctcatcacaggttgcatatgcttccttaactctgagctctgaggttggctatgtgatttacttttagccaatggaatgtagatggagacaggagggtgccaattttgagatgaggcatttagaagcccttgatttcagtagaccctcttgtgcctctggtatcaccatggggagaacatgccccagttacctctctgatccaaaaagtgcgagagacaggtggaaagagacattgtagacaccctagcaatcccagatggagagctgcttagtcaagcccattctagatcatccaagccccagccaactcatagacacctgggtggtaatgcaggattgctgcttaagtccacaagttttgggctgtctgttatgcagcaacagcaaactcataacacttacctttcatatttattttggaaccccccagacctagcaaaactcccagaatagtgtaggtgcccaaaaagtattcgttgtttgaatgaattaattaaatctcctttttgtaaaccaactcatcataatgtctcactaacagctggtatacattgcagtatttatctatgtgattttggaggaataatttaaaaaaacaataccaaggcaagacagtaacctctcttgatacgagctgctaagcatttaaagtcctaggagtcagagatcacctggctatcttcaacatcacctgcaggcagctggtgcatcacacgccatggtgtgatgaagccatcctccttcacccctgtctaaactctgatggggagaaatgagccaacatggccatgcatttatctggagtcaatgctgattctaactccatggccacctttaccctcaggtatgtgagtcccatcagagaggttgccagtatgacatcagatccacttttcctcttatttttcagaggaaatgttccaacacatctgaggaaacacatgccttcccagactggcctgttgctgtttcccaggagctgcattctggaaggtggaccatcaggtggaagaagtattcttcagagagctgccttcccaagggaatggtgacagcttgcgcttgccggggagtcctgctgccttccgaggtgtgaagggaaggcatgcactgtgcatatgctgtaccatacagttttgcctacaactgcttgtagcttcattgtagctgtgaatgctccgttcctctccttttcacccctgaagattcgcgaacatgcaggattgagctgtgcgaggcatagcattccccacatggtagacgaaggcggatgtgggtctgatggctctactgccgtccacccgggaggatggacgtgtgttccgggatatcagagcttgcggctgaccagcccacatgtccatgcagccctcccgctggctgtgtcgacattttgggtgtcactgaaggattttactggtgcagactttacaaaggcaaaattgtttctcaaggaagtggacatgaaagatctaaaatcagggctgcttaaaaaaagcaagcacagattaatgacctatctacatcctacacggttttaggactgcgcctagatgggcttaaagaccctagcctaaaaactgtaaatgtgcttccgtctttgccctgtaggacaagaaagccttacgggcttgcttctaactgtgagaggaggagaggccaggaagggagagggagaaaaggaggagaacaggagacgagaaggaggggagagtgaggagaggaggagagaggcttgtcaaaatctttttagtgcacaaaactaattttgttcatcttggatttggtgagctgggtaatattctgtgcacggctcctaaatgaattattaaatgtcaactcaagatggcttaactaaaatactcaatttaataaccaaaagtatctaaggtaacaacaacaattttgcaggtgattgtagagttgtcaagtcaaaccattatagacaagcatttggggttttcacataatctccttccacatctcatcttctgtcactaaatacccactctggtgagcatattccatttcaataaagatcatcgcttcggtgccagcttctttttattcagatcgagccagaaaaccttttttttttttctaaaatataaagcaaaacaagatctcagtcacaaccaccaaatctttattaatgcattccttgtgctacttctgaatattaataaaaattaataattaattttgcctttggcattgcaagatatactagttttaattagtgtactgtactcctatacaattaaaaaataattgatgtccatgcttattggcggtgtctgtgatcttcctttctgttgttgtcaacaaatgccttaaaaaacaagtttcaagaatgttgtgctgcccacttgatttacacacccaaagtaacaggcaaatcttttatgatgaaacagaacagttttctgtttaaattatacacaagtatattaactagaaagagaaaattaaaagctgatgtctacaaggaataatggaaagtctataaaaatgttttatctatcaacaaatttgcctggaaaatatcaatgattggcaccatctctccgctgaaacatggggaggccatcttggatgtgttatgtcaattccatcaagcatttaattctgacgtcctccttaatcagcttcagttatttaaattcagcatatcatgttactgttctactacatcattttaattgtgccatgaactactttattatagaatgctaaagtatttccctgtgcctccttcttcctctgaacaatgccagctgtagagagacagcccatggtgaaaggagggaaattgctttctttgaaaatatttgtgtcaagaatcttgcatagagagagggtggtggttgttttagcaagaaataattcaaatcccacagcacatatttcttagttttctttctttgaaccaggatttttattttttatgaaatctccattgaacaactacaaatgtatctgtaataccaagaggtaataggctaagaggaaagagacttaggaaaacacatggcaaggaagaaagagtcaatgtgagatgcagatttcacactttaccctggactcactggttaataaggatgtttacggaagaaaaatcacaaattgatgcaaatttttatcatattcatgatcttaatagcaattttattttttaaaaaatctactctaccaaagtatcagtcctaaaaacgtaatctttggtttatttttcataagagaattggcttcagagaacctatcacaatctaaaatcatcttgtccatgtgtctgtttacttgttcataatctgcatctcctcctaggtccaagtgcatgagtcccggtgcctgactgtccccttcacagctgcactcacagtgctgagcacaagctctagcagagcactgacgtttcgcaaacatccgtggaatgaatgtattaattctgactcaaaataatttttttccctccccctttctagagtcttctaaattttctttttccatgtccatcaaaatgtgaatggcttaaccagctgtggtctaactgtaaaatgtctattactcagtgataaaaaataagccacgaatacacacaataccacatatgagtctcaaaacaatgggttgagccatataagccagcttccaaggagtctacgctgtaggatctaatgcatatggagttgcagagcagggaaggctaagctatggtgagagaaatcagaacagagcatgcttgcttctggagagaatctccccaaaaagaggcatgaaggaacactccggggtcatggaaaagtcatagagcttgatcaggctgatgtttgcatgaatgttatgcatgaaactatacacctaagagctgtgcatgcatcctatgttaattatgtcttaatttttaaaatcttagtaacacattttttttctagttcattggcaatggaaggaggaaactcagaatatgaatacagttgagaggccctggaattcctgtttccatatcactacctccctccacagattcagggaacagtgctactaagcagcagggttgacagatgttctcgcaactcccctctgccctgatgcattttcctacctggtttcaccccacccctgggggctgtaacaggtctctctcatgcacaggtgatgaaagcaggggttccttcattgcaagcacgctgtcttggatgcagggaagcacccagctctctgccagaagctgtgaataacactcttaacagtccatgcaaatgctgtggtctatgtctgcatgcccagctggtctgctgatcaatttttacttctcaaattgggtcagtgaaaaaggacagcgctttctgttcctgcgatctaaattctcaatgtgatctaaattctattaacactggggaacctgaaaattccaaagcaagcctttagcctcactggggccacctttcagaaaggcccattgacctattttctttttaaactttccctttcttttaattaaaaggctcaaatttcctagatgttaatcaaagattagcttgagaattaaaatgctgtgcatcactcagaaaaagaaccaagtcgaatggtgaacaacactcctctcctaatcagtcctgaaccacctcggaaggaccttctatgcaatttcctcgtgtctgtgagaggaaccaagacaagtgggaaggcctcctgctattgtgctctggtggggagatgagctgtggatctggggcagcctttggggattctctgttgtcttcctgtaagaattggatcttctcctctgactgcacctgagaagtcctgattttctcatcctgacttttcttctcttttcctttactcatgggtaatgggtccatattcgaccaaagggtctaggcatcgcagctggccttgagcttcctggtccactgtttttgattggctcctggggtgcattggagacctgcaggtgtctgaactgccaaagtgagtcctacacctgggacaaacgctcttggtctgtccagagctgtcccttccacaaatctgtgtctcttgttgtccctcaggttcacctaggacagcctaggtcatgtctcaaggatgttgaatggtaaacaacacagaccccccgggcagtgcaggcctctgagaaccactttcattgcatgcaatgtagggacattatcaggtaagagacgagatgctgcctccagccagaggcagaggatgtcagggacagtgtgtcccgcaagagtgaaactcaggctgcatcctcaagggagggatagtttcaggtggaggaggatattctgggctccgcgggcaaaggaatattgtctgatgagagaataagagctgttttctgaagagcagttcttccctgaaattcagacattcccatgctggcttcacgtgtgttgccatttcatgtcccctctgagcacatatggcctccccaaagcttgctgcagttggggcagacaagagagacacacggaaagctgtgggcggcaacagccaccaagcacatcagggaagagcatcaggcggttccactgcacgtctcaggtctgcccactgctccgtctctgtgccccatctgtaaatggggtgtgtggggttggactcagggagttgttgtgaaggctaatgaggcccattgcaccctgtcccttgacatgttgtaaaggctgaatgcatgatagctatcattaatcgttttctaggttagaatcaaaggataagaatatttgtcttaaataaaaagccaccaaagggtgacttttaaagaacaagaaacaagcactttgggaggctgagacgggtggattacttgaggtcaggagatcgagaccaggctgagcaacatggtgaaacccggtctctaataaaaatacaaaaaaaaaattagctgggcgtggtggtgcacacctgtgatctcagttactggggaggctgaggcaggagaatcacttgaacctgggaggcggaggttgcagtgagccaagatcacgtcattacactgcagccttggcaacgagagcaaaactccatctcaataaataaataaataataataattataataaaaaataagaaacatcaaaaagtcacagaatcatataaccaggccactccagtccctgttttcttttctgtcgcccagacctgtcctcagtcagctctgccttatcccgaccgctgagtcttacctgccctctctcagagtgcagtgtcctctgctgagcccgtttcagtcaaagtcacctttaaggaagtttgtgttttaaaatggacccgagatcaatgccccaactgcaatactgtttccaccacagtgtagtttagtacatgcccctcggagacctcagctttcactgctcccccactcccatgtcaccaggggcgaggctggccttctggagtctgcagctctgtgagtccccaacagggtggggcttatttagcgatggcatcaggctgcaatgtaggctgaaacacacctaccacacactgcgtgtgcagaatgctttcacacgcattaattagtatgcgagctctcctctgccctggagatgaagggttttttttaggaatgtatctcattttgctttattaggtaataaattctttaagactggggacttggtcttatccttatgatccctcacaatacctaagtgtcccttgtgcattttagatagtcaatctgtcaatatatattttattttattgattgattgatggattgagatggagtctcactctgtcacccaggctggagtgtggtggcacaatttcggcttactgcagcctctgcctcctgggtttaagcagttctcctgcctcagcctcccaagtagccggggctacaggtgcgggctgccatgcccagctaatttttgtatttttagtagagatgggttttcaccatgttggccaggatgctcttgatctcctcacctcgtgatccgcttgcctcggcgttccaaggtgctgggattacagatgtgggccaccgcacccagccttatttattttactttatttttccataagttactggggtacaggtggtatttggttaaatgagtaagttctttaatggtgatttgtgagattctggtgcacccatcacccgagcagtatacactgcaccatatctgttgtcttttatccctcacccccttctcacttttcctcccaagtcccaaagtccactgtgtcatccttacacctttatggccttatagcttagctcccacatatcagtgagaacatatgatgtttggttttctattcctaagttacttcacttagagtattagtggaaacaaagttatctgtgtgacattttgtttcactgctcatcctcctcccctcaattagactgtaggttctgggaggtcagggattgcatgggcctcagttcttaccacatctctgaccctggcatagtgcccggcatacagctagtgatcaagaagtagtaaatggaaaaataaatagtcacattcaatagatatgaatatccagtcttctcttgagtctgaaaaccaagtggagctttcatgccccagggtgttgacacctcgctgattcctgcccttgcaagtctcccaggaaagctaaggttcccactgccctgtgtccataagttgtcttgtgtctgtctctgctatcacactggatactggaactgtctcccatactaggcccagggctgctgggggacaggggctttgtctgcatgtcacctgagccatacagtgggtgaccctagcagttatcaataaacacttgtttcaaaattacggatgggtgcggtggctcacacctgcaatcccagcactttgggaggtggaggcaggcagatcacttcaggtcaggagtttgagaccagtctggccaacatggcgaaaccccatctctactaaaaaggcaagaattagccaggcatggtggcacacacctgtaatcctcactacttgggaggctgaggcaggagattcggtagaacccaggaggtggaggttgcagtgagccaagattgcgccactacactccagcctgcgcaacagagtaagactctatctcaaaaacaaacaaacaaacaaacaaacaaacaaacaaaacaaattagtcttatcctggtcacggtggctcatgtctgtaatcccagcactttaggaggtggaggcaggaggatatcttgaggccaggagtttgagaccagcctgggcaacatagtgaaaccctgtttctaaaaaaaataaaaaataataaattagccaggtatggtgatatgagcctgtgcagctactcaggaggctgaggtgggaggatcactggatcccaggtggtcgaggctgcagtgagctaggatcaagtcgctgcactccagcctcagagacagagcaagaccttgtctccaaaacaacaaaaacagttcatctcatctttttccctacccaccctgctaacattgtggacctggaaatgggcttaaattctgatctaccatcaaggtcacaaaggacctgaatttcgtttgccagccttcctcactgctgcctttagagaaggcatccaggcatccttcattctaggggacttcacgccatcagcactgtgggaacaccctcaggaaaggggagcagaggcctcaaggggttttttctgctctgtcattcctctgctgtcagatggagctcgtttccagcctagtccactctaggcctctccttggactacacagagagacatcaagatgagagctggccccaaatggggttgaatgttgtgtgtgcttaactttttgtgtaactggccaacatgacatgtctaactatacaaatggaaattttatgatgataagatcagtagttactgagatatttatgtgacaagctgacagatataaaactacaaagcttgcttttatgcctcccatcttttcagaggaaaaatataaataccgagatgaggggtcactttgaggagaatttatgatctaaattacctaatacctggtgaacttctaatatgcatgatgaagtctgtctatggtattaaaaagataaacttcatgtcccaagactgtagcaaataaattcatcctgaagagggatccaagtatctcatcttctcctaccccaggtaaaaacccgaaaaccctgccctggaggaagggattttcaccaggttgcattgcacaagcatcttcccagcctgggtcaggatggcctcacgtggtcatcaaacattaatccattctttggagagaaatctaagtcctgaaataattgtgtgttgataaaatatagcaataaaatacaacattcccttgccactgcggagtgcacgtcaaccaagaaaaacagcagaggaagctgcgggacacgttgtgggcactgcggctgtggctgctgccagatctgtccttcagtccaggtgacaactggcaatgcaacacctcacctgcgcacctggggtcagccttctctccatgcctggctgctgccacttttcctgctctgatgggcatgggagttgccaggctgacactggtggtgtctgggataagcccttggcagctggacaacctgggctttcttgttgactcggtgccccttgttaccacttctgaggagtgcagccaagccccggtgccatgagtgtacctctgtgccaagccatgacctggcactctgcaagcctaacttcctttcacactcacaggtgctttgcaagcggaggcaccactcatcatcctcatcaccagacaataacgagagcctgggaggaaggtgagggagccctgtgctctgccctgtcggtggttgggaaggctgaatgaagcatcatgctttgagtcactaaatgtcaccttctcatgctacttactcaagattgcacagtcctgatggggctggtgtttaaaacccagtctccctatatgcacaacctcaaaccctggctgtctggggaacaggaatagattagaggtggacgagacagcaagtttctctcttgttttgtagttgctcctttacaatagtgtctcttccagggaatcatggagtgtcagagctgagtgggctcattgctagacagagacatggaactccagagaagaggggggcttctccgaggccacacagcaagatggtctgcaagggaggccgaaagcccagctcccttcaggccctagaccaactttccactctgcctcctcctgccttctttgaattttatatttcacttcgttaatgccctgcctctgcccagcgcgttgtcatggtttgattattttaggggtgtttgcagggcactaacctttcccctcagtgtgtttgtgaattcattgtgtaagcctgtgtgtgagtgtgagctgcgtatcaaacccaaattaaactcttttactgtattttatcctatcgatcttctgtgtactcctcagcaccgtctcatttaaataaaacttccatttgtaacaatcctataaatagaaagtcttattgatcagggccccaccggcaggctgcactttggttatcactgaagcctgaccggttaatgcgagggatactatttattatgcagcaagacacaaggcaaggccgtgccatttagatctctaaacagaagcgtgctcagctccagcaagaagatccaatggggctgtccttgggatcacaatttgctcttcattcgccatttcccaaccccagatgctcaacagggttggccttgttggagacatacttgccccagcctgcatgggagaagtcaattattcaccacggcaatgaagatgttagttcaggaacattacaaaagctgggttctggcctcatgtggcggctcatgcttgcaatctcagcactttgggaggccaaggtgggaggatagcttgagctcaggagtttgagaccagcatgggcaatatggtaaagcaccatttctacaaaaacatacaaaaattagccaggcatggtggtacccccctgtaatcccagctacccaggaggccaaggtaggaggatcacttgagcccaggaggaagaggttgcagtgagccaagatcgtgccaccgcactccagcctggacaacagagcaaaaccctgtcaaaaaaaaaacctgggttcttctccacttggaggtcatgctggggaaatgtgagtgggcttgtggtcaaccagaaatgttaaactaaccacattgaagtgtcaagattctcagcagtactaaatactcactatgagcaggacatggttacctaggagtggaatttctttctgttggaagctgtgctttagatcatgcagctattgctttgctgaataagccactaaccattgttgtcatcattctgctgggcctttcttagaaattgccaataacgccaaccagtgttcccaaaaggtttgcaatcaaacggcttcccccaaatccgtggaagccaggcataagtggaatgctgggctactcatggaaataaggtcacatttatgctacaagtggagaaatttggcccaaaccccttgcttgctcccaggtgccctgctccctagccaggctgaaacttcctgctggggcttgcctgtgtctgaggctccatgctgggtctgctgacggatggacctgtggatactgaacaccgtagccaacaacctgaatgctggatgtgctggaaactcacttccaccagaatgctgcagagacccatcagagaagctggtctctcattccagaccccaaagcctccaggactgctggtttcctgtgccccatctgccaatattggataggaagccacctttcaagtccacatggcacagcaggagctagagtgtaacgttccttggttttgtctttggttttgtggatctccccttgtgtccttagctgtctgtccctatttacagcaaagagaaggtgatcatgttaaggagccagtccagtgtcccctgccactgggcacttatgttttccattagatctctcctctgaacagaatgcttgacaggtatctccggacacactagggtgagggcttgtttacttgctacatggcttcagggtaactgggaaaagacctgccatcagacatgggggccctgacatgccagtatcaacaggaaacatccctgggccattggtgtcacacagtagcccaggttcacacacacacacacacaaacacacacacacacacacacagctataagcaagagtatctctttctgtgcacagtgcggtctactgctagatcagaaaaaataagcacaaggacacttctttccaaagcatcaacatggcctacagaaactaagcggtctgaacactcagcctaaaacatctgtttcctcgggtttatccaggaacaacagttagaactttcatgggtacttgttctatatcagagtaactaacacgttcattcagagaggtgtcccaggaaagagaaaatatgtatcaatgaagtaatcgcatctcctttgtaactagttgaaggcaaaaataatggtttttccagttacttctgggtctgtggaagttaaaaaatcactcggcccaagttcctgtggggacactcggcttccaaagtgatctctaaactctcatttatggtcctctctcattaggccagatgctgaacttgctcatctgttacactgcaatctgggtcttcataaggtcttttttactgttaaattttaataacttgtgttataggtaggatagaaacaatatcttagtggcatttaaaagcaaatctattaaatttgagggtaacggcattacatggctagaaacattatcatttcaatcttgcgggggaaaatggctaccatacgagcgaaggaaaattctgtactttggaaaacacaatccaagtctaatatcatttgtgagaaggaaattctttgctcattaccagggagattgtttttatcttacctagaactaaagttattaaagtttgagaactgtaaaatgcttaatgagaaactgcagaataaattagagcagccaggacctgcgctggtatttgccgatgataaacttcaaatctcgattgtgggatagtgccttggcttacccagagccccccttgtgagtgtacaatgactaaatggttaaacggagcagtaaaatattaagtaggtaaccatggaaaccatgatgctgtccagtgtggggacataccggggagcatttcctgttggattcaagggaggcgttgatattcctgccaaaagccagggcagcttgacccatcttctggacttgcttcactatcctgcccctgtatagaccctgcatgcgatgaagaggagaatgttctggcaggcacagaaagagacgcagcagcttgcacacgagacaagcaaagagaggcacaaatgactagctgcagaatattgccacctgccaggagtgtccaccgggccccccaaatcacacagctgaggaggttcaattgcagctctgggcatctacaaactgtaacaaaagtgccaatatgattagccaaggagaggctggctctttgcttctttaggggaggggaggtggaattgttcactaatctcctctgcactgggcccaaggactgttccatctggtgttagctccttgggaccgtgaactgtgtggtctacttgccactgcacatgataggttaccttctactaaaatgtcccttgtcctcccggagtcccactttaaagcacctcctgaacactgctgtagatcactggttagaccaacctgaagagcattttaaaaaatattcatggccaagagccacactgggagactcccattttattagtttggagagaagatggatatccatgtgttttaaaggctccttggcacaagccaagggctctggctgagaaccatgaactctgaccagttgttcataatctttactgcacatggggctcacctggggagctttaaaactactgatgtgatgcacgagtcccacccccaggaatgctgctatgattgttctagggtgtgcaatcgggactgagacccattcctgccttggagggtgggccctgagccagtctcaacattcagggaagaaagaacagagagtgcctcagtgtctctgggtaaagtgcagggtgttgcaattgcagagaggggatgctggttggttgcaaacaggcacttggacctgtgaggtttcctcagggctcttgcagactcttggagtggtttgcatgcacttggtaagagtattaaagcaccaaggggtcatatagattcccacccgtgtttcccaaagtcccagagtagagaaaaggagttactgactgctttctgcactttctgtgggcacagaagctgagaggggctggagtcctagtgggggatggatgagtgttaaggttggaaaggtgtttgaggatcaggagtgaagaaccttgaatgtcagggtagagggatctggctcttattctataggcaatggtgcatcttggaaggatttggggcacatcagtttgggacatagggaggggaatgtgctcagagctgagtttaggaaaattaatttgcagggataagacttgaggaagacactagaacgaagagatgttgactagaagcagttataacgggtcaagaaaggggtgatgtttgtcatcctttccttagaaagaccaagaatatacacttggtgttgttcagggtctatgatccctcccagatctcacttggtatgaaggatggaattctgttcagacaaaggacttgttcaggccaaagagccaaactggtcccacaggcgtgtgaatcaggctgtttgagaaggactttctgaatggtgtttcttatggaaaactggaaaacacacttgccagcaagtattccaattcaaaatactaaattctgagtcagcctgatacctccccctgggtgcatttgagctccaacttagagatgggcactgcattgggtgactccagttctcttgctacccgctcctactccttgacagaaggtgatatggtttggatctgccttccaacccaaatctcatgtagaattgtaatactcagtgttggagttggggcctggtgggtggtgagtggctcatgggggcagcagtttctcatgaatggtttagtaccacctccccactgcccttggtactgtatagtgagtaagttatctcaagatctggttgatttttttttttttttttgagatgaagtctcactctatcgcccaggctggagtgaggtggcatgatcttggctcactgcaacctctgcctcgcgggttcaagccaattctcctgcctcagcctcccgagtagctgggactacaggcaagcgtcaccaagcctggctaatttttgtatattttttagtagatacagggtttcaccatattggccaggctggtctcatactcttgacctcatgatccacctgcctcggcctcccaaagtgctgggattacaggtgtaagccaatgcacctagtcgatctggttgtttaaaagcctgtaacacccctcacccctctctcttcctctggctcccgctatgtgaaatacctctctccctttttccttctgccatgattgtaagctccctgaggccccttgatgggtgcttccatgcttcctgtacagactgaaggaccatgagcctattaaacctcttttcttataaattacacagggttgggtatttctttatagcaatgtgagaatagactaatacaggaggcatcttcctcctagtattttgtgtctttcatcttgttctctccatatacggagtggtgtggggaaaacccgcaacgaggtaacgatgggtggagaagaaggtgccaagagaggcttcagatctcttagccactcaaccaactctgtccactgatggcttggatgagctgggccctagcaagctcaggaccagcccagggagacttccctgcacccctccctccaccacgcagaaagtgtaggccctcaccttccacccctggcaaccccttatgtcccccttctgcttacaagcatgcaattactcacaactccaagcccaagagggggttggggaggggaacagctctacttgcaaattactgaagattgatttgcatcactttcctttaattatgtaagaatgtgttagaaattattaggtaaaaatttgatgtaactcttcttcaattaaacacagtgatggaggcaaaatctctattagtgtgcaaattccttgggagagcatcttctccgcacagcggaatgtctattagctttctgccaaaataaaggtcaccagacgggagccttccccatcacactcttacttccatggacatgcagtgtaatcaggcaagatgtgtcacactcaggaaaccaatggtgccattatactgaatatacccagtgcattacaacctggtcccctgttccctaaaggtgctcagaatctcatagatcctggagactggcttaagagaggggaggacagatgtttagttccaagagctggagtttatccttcctattgtcctgattaaaggaagaggcaaataatcccagtgcctcttgaaccaccccaagtacaagaagctcactgtgggtgatgtaagctgcaaagaatatttagagggagagggagagagagagagagagagcctcaatccacaaactcagagtgcaagaatgcaaccttcttcatttttctgcaaaaacttaatgcttactttgagtcttcattctgttgtgtgacaaattaatatcagattgttttcagttcttgtccaggattggtgtaagtttcagaaatttattatgcacagctaagtggctgacagaaggaggaagggttcagtgcttggtcttcagtccatgctggcatccaccaaaaagtgcatggttctgcctgattcttggttattgatttcagcaggccacagcttgcagcatctcacttatcacaacagaaaataggatctgagacatatttgcaaatgggtatttctaagagaaaaaaacaaacacatacacacaaccgtgggtacaagacacctttggactcagctagcccagcatctattatccttaattctggtaagatcacactgattttcttttgggagactagcccttctcaactctcagtctagattatttgagtgaaattgactctctatcttaggtctagaaggggagacgtgacttagccaaccggcccgttttgtcaccctagaacttcaggattgtccatggagggtctgcccctggaacttggctagaatggctttggaagaagcactgtttcctggggagatcactaaactggaaggctcaagctgggaatggctggtggcaatctgccacaggctggagacaacttgcctgagaaagaaagcaatgtggaagactacagagctgcgagatggaaagagacggggttctcaaggcattgttgaagccatccatacccaaacacttttcagttacttgaattggtaatttcccttctctgttcaggctagtttgagctgggcttctgttgcatgtaaccagaaaaaaatataagtagaacactacaaatctaaaagtgaaaatcattccagctcaagaatgacttatggacaggatagatccaggtatggaggggcctgaaactggtccaattttaagaaaaataatacaactttaaaaatacaaaaacaggcacagagcctgggaaggggcgcatgcaaatgggacccatggaatttaagctcctttagcttcattgcaattgggaggcctgggtacttgtctccatttccccgaaaagcctttgataaaatcacttcatctcttaaagtctccatctcaccattgagagcaagatggttgatctcagttaaatttcatccagctcgaaaaacaccatgtctctacaatctttgctgaggaaatgacattgcttaaaattatatattttttgatacttgcttgaataaaagtttctttgtctgtccaggacctgcctgggtgttctgatgctcggaacctctacatccttcttccatgcctcctacctgcgggccgctctactgggccagtgaattcacgacagctgttcatttctgccatcttggtaagcataaggccaacgaggaaaggaaggcagatcttgaaagaataataccaagctattgtactctcttaggaagtgtttcttcctcagctgtctgggcagagaagctttcttaaagaatgttttcatacaaaatttctaaaatgctgaaaatacaataagattaacggcccctggaggctatggcttaaatattttatcttcttagatatcagttacactgcactttcctccaaggatctaaagtcttttaaatatagcatctaattaatcctcctgtcatctctggatggaatagcatcattaccccaatttcacaggtgaggacacagaagctatgggaggggtgtccacaggcagaggtggcctgattccaatcagtagagacctcggccacagcactggtgactgacccaacagggacatcatcaggaaaagtccattcagaagatgacactcacgccctacaccacagagcttatagactacagccagcagtcaagaaaatggtaccataggaggctgggggacatctctgcctcccatacacagacaaggcctcagagagagagtgactcacctcaccaagaagtgacagattcatgatcctgatgaccgcatggccaatgaattacacaatcattgcgtcttcacaaacagaaacaaccactttattaatacagttgttggatcaaaatggtgtttttttggccgggcaaaaaaacaggcccacgcctgtaatcccagcactttgggaggttgaggtgggcggatcacgaggtcaggagatcaagaccatcctggctaacacagtgaaaacccatctctactaaaaatacaaaaaaaattagcagggcgtggtggcgggcgcctggagtcccagtgactcgggaggctgaggcagaagaacggcgtgaagccaggaggtggggcttgcaatgagccaaggttgtgccactgcacttcagcctgggtgacagagtgaaactccatctcaaaaacaaaaaaaggtgttttttttctccccaaataaccagataaccgcacagattgtcatttgcttccattcacctgacacctgccatgtgtatcagacatattggccatgcatgacctctgtttcccagccctgaaatgtacctgctgctaccctcattcagagaggcaggagacagcttaaacaagcttatcaaattggttccagcaagagaactagtggacaacagggccaggattccttccacaactgttttctgcctgccctgtttccttttttaaacgatttttattgtttagatccagtgttcagcaatgtggcccatcactgctggtgaattctactggataacacagcagacggaagctccagaaagagacgcttccacggattataaccatgtcaccatagtcaccaccactgccactgcttatgggaggtcaggtgtggggtcttgagaaggaggagttgaaactcaaaaatcacccaaaggctgtctcaaagaaaggtagttttctcattgtcaaaactcaaagttactcactcttaaatgcttttcctgcctccttttcgaatctaaagcatcaactacatagggaaagtcaggctgctttccaagcatcaaagccaaaagagtctcacttttggcaaaggtaacagggtttaaaagagaaagagagatagaaccagggagagagaggaaccagggagagaggaggctgacagtggaagaaaaggaaagagagggaggggagagagaggagagggaaaggagagagaagagagagagaaaataaaagagagacagaaagagggagaggagagaggaagaggagagagaaagagtgagaggagagagaagaaaagagagacaaagggaaaggagagagaggagggggaaaggagagagaggagggggaaaggagagagaggagagagagataaaaaagagagaaagagggagaggagagaggaaggggagagatgaagagaagagataaaatgtgagaggagcgagagaagaaaagagagaaagggagaggaagagaagagaaaaaagagagaggagagaaagaaaaggagggaaaagagagagagaagagaggaaaagagagagagaaagagcaagaggggagagaagaaaagagggagaagagagaaaaaagagggagagaaaagatggagatgtaaaaagagagcagagagagagcatgaacatgaatgagtctatgtcactgcgacagcaacaacaaaggaaagaaagaaggaaggaaggaaggaaagaaaaggcatgtagccatggaagatgaaatagaaagagagaggaaaatgtggaaagaggtggagaagagaaagaaaaaagaaaagaagaagctgctggagaaaccccagccttgagacgggagcctctgacccacgttgtaaaatgacaaggattgagtgagcggtttttaatacagataatattgtccgtgtagtctataaatataaaattaaatgctgacctctctggtccatgtcaaaagtccaagccagtgtcagcacatattgtttttatttgtttcaagagaaaatagatcaacaacattaacctcccaatgaagagagaattgaatgaattaaaaagcagagccataaatcgcaccggttttattggcaccatgataaacatgcccgaggcctcgcagggagtggggtctaggatattctcaataccctgcagcctctttgccaccaagaaaggaagagagatattaagaactaagaacggggcgctgttctcccacttccaccacctctatccatcaccatctgacaaaggctccagcacacgcttcgagaaaaatattgagaagaaaaagaacctagaaacagggcaatttggagaggccttcggggagccaggggtgcccaagcggcccactcgccagctgcaattaacaagaggacttgtcagggaagagggggaagctgggcgtgggatttccaggacacaactcacaggccatcagccggagagagcatcctgggggctgctggctggtcctctgccctctcccggctccagccctcctcagaccagtgggttatgcacacagacagctgcttgccaatgaaggaaacacactttatttccagcttaagaattcacaccatcacttgggcagttgctaaataaagcaccatttcccttatccatttcatgtggaccttttagcacttactttataatgattcagaaccatttttaattatgaagacttagctgaacacattcgtttacaaagaagagatattcacagacagttgtgctttctgctttgccagcctggcctcaggaagccatgcagaagaaaatttccaggaatttagagtgttcattcctcctgttcacaccccttcttaccttcattcacttcctcttttatggctggaagtctggagctagggtgatgagcagagtggagattgaagaaattctttaaagtccccggttgactttttgataactcccttagccaccaccagcagagaagaggaggactcagtgatttggggaaaagaatcttacatgagagaagtacgtaaaaggcgacataaatcgtactgaaaacaactttcgtttataaacaaaagaaaatgttatatatttataaaccaatggcagaccaattggctagacctgtaaaactcaaaaataattaccctttggaacaaacctacaaagcaaaagattcttcagctattaaactattttcggtaagtcattattttatgaagctattatttgctctaccatctctactgatttagttacagatattttaagtctgtgtctgactgtgacaaaactcggtcagggtgaccacccagttatctgggctcatggacatggtattcttttaaccagttaaggttacatttacttaattagatctgagaagtgttctctttggctgtgggagtatgtgcaggtgtgagcttggcacattgtccacaatctttccaattaggacttcctttttttaaataataaaaataacaataattgtggccagcacacacaggactcatggtgtgtcatgtattgctctaagggcttagcccagataaacacatttcattcccaccactcccctgccaggcaaagcattggctgtgtgtccagaaaacagaggcacagacaggtcacatcgtttgcccaaggttacccaataaatggcagaagtaggattccagccctggccgtctggcactggagtctctgctctaggtcactctgctgtacgcttcttcctttcctgggccctgtctggcagctccctgagtctctcatcatgtaattttaaaggccacatttgtcttttccagcctgtgtacaatgtaggttgccaagtccaccctgcccaaggccgcagtgtggcttagaagaggaatagctggaacttggctggaattgaccccaatctggtcacccagggctcccatcccctgacactctctccagtgtctctgtgtgtcccctctagtgggctctctgggagtcacagtcatgtcagatggtggaggttggcccagagctatttgtgctgaagcatttctcagtactcctcatggaaacagctccttgagatttaaactgcagcatcccggtcaccgggcatagggcggggaaaagggatgcccctctgtcctgcaggattctcgtctctcagtcaccagcatccgtcttttgtccaaacaaaagaatattcatgtaaactgactcaagcacattgcagtggggctggatttcagtttgccagactctcccaagcacttttagattgcagtttgcatgagggatgacatccactgttggaacacgaagcaggtatacccaagtcagtcaacaccatttccattttaatattaacacacacataaacaactcaaacctgtggcttcaatgaactgatttctctctctccagcagcccagttacctgagacatgttggacagcttggctctggtcagaatatatcacccaccatggcctgggacttcagagactacctgccgattcctctatgatagacatttgttgctgtgagacctgggaaaagttgctcagctactctgagcctgttacctcctctataaaaatgggaatttctaaagtatcaacctcatagggcttttaaatgcttttgtaaagcacctggcagagttcctggggcatagtaggtgttcgataaaagtgagcttgtgtatgtggctgatcttcctagtaatgcaaaatgagacacgtcacccatgggtgacaggcatctcccactgccccacatcccaggggaccaaaaagaaagtagctgctgataaatatcacattgctctcaaatgcacctattttgcagaattcttgggttttatccagaggcttgatgtcatatgatttcagcttaatattttcttttttattattattatgctttaagttctagggtacatgtacacaacgtgcaggtttgttacataagtatacatgtgccatgttggtgtgctgcacccattaactcgtcatttacattaagtatatctcctaatgctatccctcccctctcccccaaccccacgacaggccccggtgtgtgatgttccccaccctgtgtccaagtgttctcattgctcagttcccacctatgagtgagaacatgcatgtttggttttctgtccttgcaatagtttgctcagaatgatggtttccagcttcatccatgtccctacaaaggacatgaactcatccctttttatggctgcatagtattccgcggtgtatatgtgccgcattttcttaatccccagtgatcccattactgggtatatacccaaaggattataaatcatgctgctataaagacacatgcacacgtatgtttcttgcggctttattcccaatagcaaagacttggaaccaacccaaatatccatcagtgatagactggatcagcctaatattttcaagcctgttggtaaaacgtttctaacccatttccaagacagccttgggaggtaggtggtctgcccttagagaaacatctctgagaagtgggtctggcccagatgatgtagaatgtggtgcctctgggactgtcctagagggttctgtccccactaacacccagtaaccacacttccttcccaagacatggctaggaagtagcaagtctctacagggtgaacgtcctttcccaagcctgagcatagatggacgatcagatttccaagctgtggaaattcactctgatctgcttcaggcctaaacatcatacctcatctcccctccttgaaggagacctttccataagggcttagagacgtccaaaacaaagaatagaaggaagacctgcaaatcaaacacaaacaaacactatgctggaccccaagccaaatgcgttccatctcagctaatggagccagaaataatttctgttaatttctctgcctcttagaaagagacattttcaattcaggtaagatattgctgagctaaatgccaagatcttagtctcagaccatcgagatccagattggtttgtcagagaaatgtgagtcattttccgggggtgagtgttgaaaagaatgtcaggaaagtggctgtaccagcacaaacctattcacctttccaactactcaatgcccttgcattgtttctatagatgattttctgtttaggaagcagaggtcttgtttataatgatacaaagtgatgagtgagtccatagtgatgaggttaattaattcaggaggtgtagatactccaactgggtaattcaagatgaaaatatggagttcggcatgtgtgagaaataaaagtcttaatctcctttatcactctgttttatatagaagttttattaacatgtgctagggaaagagggcagaggataaaacatccacatgtcagccattttctctgagagactggcaggggtctggcctgtagatcttcagagaatgatgttgaattattacccaccattaggagggagtgttcatttctcatttgtctgggatagaaaagcttcttccataatactgagagctaatagctccacaaagagtagagtttgagttcctaaattaccaggactggctaggaaccaagtctaaactcgcccagctttccacgtctcactttccatttgagcacgagagataccaaccccagatcagacgtcccaggggaccaaggaaaaattaaccaggcatcaggctgctgataaatattacgtcctcctcaaatggatctattaggcagaattctaaggttttatccagaagcttgacatcatgtgaatccatcctcatcttttcatccctgttgctaacatgtttctgaagtactttcaacccaactgaagactgtgtgcccgcaaaatgaagggctcacttaaaaaccagtgattttccttctgctctgaagggggtgcaggcaggtgcatctctgctgccctgtcattatcaggcctcttgttggccctgcaggcaactgagaatcccccactaggggagaggaggtgccaaaggcaggcaggaggtgattggttcaggtattgatcaattcttactcacacatgacctttcacctccctcagagcatggcagccacagctaacgtctgatattcacatttgtaattaaactggaatattaaacatctgcatccatgacaacctgggcgatgatctcatttgatcccccatgcccagcagagagcagctcccagtgagctggagagagagtgcaccagggatgcagcagccacacagcctgctgggcaatccagggggtaggaggctccgttgcctttgcccaatcacactgcactgccaatcttcactgcttgggactggctggaagaatctggatgcatctatgtcaatgcaggagggaaactgagccatagcaatgagcattcactaagcatgctgcatgcccaagaaccatgttattgggccctgcaagtgtctcctcactcggacctcctggttgtacagatgaggacaggcccagggacccatgaccaatggctcagtgatggaaaccagagctccatgctgaagcagagcgttttataccccacaaagcacctcctaattcagtgctacaacttctccacacagcagcctctaagacattggtagggaaggatcataactattggcgataacagactagaggctcagcggttatgtctcccatttaagccctctacaggacactcataatttttaaaactttgcatataaccaaaagacaatgaagtagcaagacaaggtttagaaataatggtatattttattttttatttttatttatttattctttggagacagagtctcactctgttgcccaggctggagcgcagcggcatgatctcggctccctgcaacctccagttcccgagttcaagggattctcctgcctcaacctcccgagtagctgggagtacaggcgcacaccaccatgcccagctaatttttgtatttctaatagagacggagtttcaccatgttggccaggctgctctcaaactcctgacctcaactgattcacctgcctcagcttctcaaactgctgggattacaggtgtgagccactgcacccagcctagaaattatggtacatgttaaatatttactttttacaaattaatatctttaacacatagatgtaatatttttgtgataactgggatatttattaaatctgtaatacataagtacattacagatagtgtgggctggtgatggtctcttgcttaaaatcagcgtgacaaaaccatctgcatccgtgtgtaactgctcagactcaagtggaagctgagccagacctttgtatgtggaaagctctggttcaaatagcaccaggtctgaggtcccctaacccccaggcctctgagttttctgccattccagagcgttcaagtgagcaaatgttcaggtggacaattgtatgcctgacagtgaccatggggaggggacgtttctctgtctacgcacacagcctggccatcctgtatagttaaacagctcttgccttcttcccaaagatgcaagagttgattgctggagatttgactgacagtttataaggcattcttggatgcatcaagaccaaaggcatctataaacataattcaatcacatcaatttccattactctatgtgaaggagcactcttggggaaggatgtgctccaaactaggtcattgctcttcacactctggaaggtgacccacaggcagcagtgtatagatcattcatgacggtcttggcaggagaccctgaaggagcctctgaggacatgagcaagaggcagaccaaggactcttgcctgggaagctttgcaaaggacatctctaaaacttactggagatcagtcacgttggcttacttctgcagtgccagcactttgggaggccaaggcaggaggattgcttgagcccaggagtttgagaccagcctgggcaacatggcaaaaccttgtctctatagaaaatacaaacattgggctgggcacggtggctcatgcctgtaatcccagcactttgggaggctgaggtgggtggatcacgaggtcaggaggtcaagaccatcctggctaacatggtgaaaccccgtctctactaaaaatacaaacaattagctgggcgtggtggcgggcgcctgtaatcccagctactcaggaggctgaggcaggagaatggcgtgaacctgggaggcagagtttgcagtgagctgagattgcgccactgcgctccagcctgggcgatagagccagactccatctcaaaaagagaaagaaaaagaaaatataaacattagccaatgttgtggtgcacacctctagtcctagctacttgagtggctgaggtggatcatttgaacctgggaggttgaggctgcagtgagctgagattgtgccactgcactccagcctgggcaacaaagtaagaccctctctctcaaacaaccaccacaacaacaaacttacttggcggggagcaagggaagatgacaggggtagaaaaacatatgttgtctgggctgtccaacactcattttcccctttcatggtcactcaatacatatatagtccttggggaagcacctctccctttctcttggtcctcatcttttgtatgggctgtgtctactctaggcttggagggggccattcagagcattaacatgccccctacatcacagacgcacgagtgttcccatctccaagaacttttcctctagtgccttgttcccagccagtgacccagaggactaagtcatgttaatttacactaaaatgttagtgactgaagagttccttgttgtactttagacagtacttgattgtcacagggtatttgaaagccatggactttgttatcagatcctgtcccaacttcccttatagtggttatttggccttgaacagaacaaattgtttaaccttttttggccatagtctactcctttgtaaaatgaagttagtaatatctacctcttctgtccttttgtgatgcagatatttgtaaatagctcagcacagcatctggtccacggtagcacccaataaatgaccaatgtatgatcagggttggagtgggcaggaagaggccttcatgcattcatgagtgcttggtgtctgcagcaatacctgccaatgctggctgtgggcagaccacccctgcgcctcatttgggaccctcaccagggtcaggattaatgtcacttctctgcatggtagttggaggtatatttctcccctgaaacccctttgaactttctgattagcacagagaattggcacttgagctggcacctggagaccatggcaaggcaagaccatgaaggcaaggtggcaatgaagtcaaactggtgcagcagaaagagcactagagtgggagtgtggagttctggccaactgcctccctgtctcctgctccctgaagatgctggtcatgtcattcttttctggttcactttcccctcacatggctgagatgaggatcctggggttgtttcataaactgaataagttcttgctcacagccaggtcaggaaggctgcagatccagaccctcctctgccattgttagcttccaagggtagctccagcatgctttattcatgagccctcatgttgatccaggagtttgcggagatgtggaaattagggaaagaggtaataatccactcaggtactgttagggactgaatgtttgtctccctgtcaaattcctatgttgaaattctaagcccaagagcaatggtatttggaggtgtggcctttgggaagtaattgagggtagattatgtcatgatgataagagccctatgatgggattagtgcccttataaaaagagtaggacatgggatctttctgtctctctctctgctttccactataggaggatccaaggagaagacagctgcctatgaaccactggatctgccacttccttggtcttggacttctcagcctccaggacagtgagaaataaatgtttgttgtttaagtccccaactatggcactttattacagcagctcaaactgaccaagacagatgcacagaatgaaattctccaggggaacatgaatcatgtccatctgaccaggagctaagtcacagttctgaagcataattgggaggaggaggaggaaaacacctttacctacacttaacccttcctttggggttcatgaaaggacatttattgcacatatcaggtctacatataagtgtgcatgtatacatttatgtgcatgcatgcagagacacacatacacttgcacacaaacacatatgacacctatctgcagcatgcacaaacacacatattctcccaggctattggaagtcctgctatgagagtaccataaccctgagtgttctcattcatgtcccagatctctttcctacccagactctgggcatctgacactaagcctttcttcaacttccaaattcaatctgctactccaggctgctctgaaatagtgggtatgtatcagttagttcttgctgcataacaaaatgccccaaaatatagtggcttagatgacaagcaaccacccagctcactatctgtgagccagcaatgtgtgctgggcccagcagagtagttcttctagactaggctgggctccctcatgtgtctgcagtcagctgccaagtcactggaagcctgaatagtctaagataacctcagctgggatggcacatctcactctacatggtttctcatcctccagaaagccagcctgggcttgtcaatatggagttcacagcgttccaaaagaaacagagcagaggcacgaaaggccttttgaagctgaggctgagaaatgtatgttgtttttctctgctgcattctgttggccaaagcaaggtacatgactagctgagattcacacagagggagagggagtctacctactggtggaaagaatggcaaagtcacattggaaagagagaggggatggggggcaatgccattttttcaaataattaatcacaggagagatacagcaaagggccctggtgatggcctgtagaattaccaggagtcccaactaagccacacagggcctgggtttcttgcggctccaccctcacaccttccaccccttccttgctgcagtaaccctgctgtttcccctaaacacgcgaaaaccattttgctctgctacgtttttcactgacagttgagaatacttttttttacccatttatgggtgcaaattaatgagatgacaacagactgaaaccaatgacaactgctaatctgtaagcaaaaacaagggatgaggagccgagagcagtgcagctgttttattttaattgaggaatgattttatgttaggaacactcaatattcacagcaaattaaaaataatgaagtgaattgataccaatgattttttttttttttttgcttactttccctttgtaaatctatttcttcacacaaattgacaggtctgattgatacatacgctattattcctcattagtaggctgaataaaataattcttgattaaatttattgcaatttaccaatacagcataatgtttgcaagctataaaagtcaatcaacaggaaagcagagggaagccaatgatattatttcattttatataacacataagtggcctccccgtcctggtgaagggaaggccatcacaagactcccaagtgggcaacacacctcaaagaaggggctccaaacccatgttggttttcatgatcatcagcaggggcttcaagagatcacctctccctctgctgctggcctgggctcgagccatccctgctctcctggcctacccaccctcagctgagccttgcgccacttatgattttaagctgcagtgacttcctggggactggggttggcaatgaaacctgtcacctacacccatcccaatctagctgaatatcagaatagaggctgcctagagagagaatgagagaaggaagccacaccatggcctcctagatcttgtctactcaaggcacctatcttagggcttctgagtcagatggagtcttgagtcctgagtccaactgtcctgctgtgaagtaagatctccttggaagatctgcctccctcttctcagatttcacaccctgccagcaggaaggatgcatctgactccatggatatgctctgtttggcccaccaggatttaaacaagtatataaacctttcaaaacttggagattgcacataaacccctggtttccaggtttctcttgaagatcaggaatatctggctctgtgaaacccctttctgtgtgtaactgagccaagcagcaccccttgggtgagaatgtgttctctactccccattgtctgtcattctgttcccttccttgttttctgtcacctgcctgtcccgaaggtatctaaatctgtgacttctgcagtagatgggctttgagtgcttagggctttaccctttttactgctggattgtctcatggtgactgtgcacctagctggggtgtaatcggatttaataggagatatataaacctatagcaacaccatagaggatgccagacttgcttaaatgcctccactagcgtctctcctgtgctggaggctctcatcctccttctccagttccctattcaagcttttaagttttttaccctgcagaacctcctccaccctcatcaaacacatcccttcggtgtcccctttcccatgatcctggttgttaggctatgaagtaatgaatatcctctctcttcaaggtcacagtgatggggaagtgcctcctggactcctaggtccccaagtctccacttagagcagttctccaatggggataaaaactaggatgggtattttgactcgacagacctttgcggagcctttccaatcagatcctctggaacatagtaggtatgcagtcaatgcttttggacttgaattctaagactaccttcctgattgtctctgatagttccttatccttctcagtagagaatgtttttctcaggtctccacatcctttggggactacaggtacatctgtcctagaaatctctcaggccaatggctgggctggaaatttatgaaaccattgatcaaggaaggttgtccagccatgcatgcctctggcttgtgcagatgacaatgagcctgtaatcctgcaggtcacttgctcctgactgcctcacaataataagaggcccttcagactcccttatagtaataagagctgctaataagtttgaagggcttactgtgggccaggccctgtgccaggcactgcccatctatcttgttcatcctcaccaccacctttgaggtgagtcctgttatcaccatcctttaggaggctgtgcctaactgaaatttctaaactatgcccttcaaactgatgccagtcttgccccaatattcatggatgagaatacatgacagtctatcaacaaataattattgatccctcgataaagtgcaatactatcctgggcacattgatggatagaaaattcatatgagacaccttccctgtccttcaagaacttatcatctatttagggagatgagtctctgtattggcaataagtcaagtacaaaattgttttatacaatgataaaggagcttagagagggggaggctggtaaagtttggagcaatgaaagatggttcctgaaagagccaaggctttagctgggcttaaaacatgggggagaagaagcgcacctcctcccccacgtccctggcacgatctcctgcagctccttcattcctacccagcccttcttggaaggatgttcacggggtcatcagcctcctcccatgcagtcatgataggcaaaattagaccacctgacagaagctgtgaggaggctgtttggcgtaagtatgagagaaggactttctcagaatcagaactacttgttcaggtaaaaatgatgagtttcccatcactggggggtttgaacaagtctgttgtcatctgagaggttgcaaaagggatttgaacatgcctccaggtcccttctcctgcggccctggcattccagggttctgtgaggcacagaggcagcagagatcccctcagggggtgagcacaaaagacagggctgataaggaggtatccctggggccagagaagagatctcaggcacaagacagcacatacaccgccaagtgcagtgacagcagagggatgcaaggcccgggaacatggaggatgctctgctggtgattcccagggccagtacagaagtgtgcatagctctgcaaaggcctgagccctgctggggactgcaaacaggccagcgggctaggcctgaggagggtgctccgatgctgggaaggggacttctcacagacatttccacctgaaattccacaggaacaggcacaaagtacacagctcaagtcctcccaccccagcctcctcctcttcctcctccactctctcctcctccccctccccctcatgtttctctttctcttcctcccccttctccatccctcgcctcctcctcctcccctttcttctcttcctccccctcctccttttcctcttcctcctccccctcctcctcctcttccctctcctctttctcttccttatccccctcttcctccccaacctcctcttctccatctctctcctcctcctcctctttcttctcttcctccccatcccccttttcttcttcctcctccctctcctccatccccctctcctccaccaccttttcttcctctccctcctccctgcctccactccacttctctatctcttcctcctcccccttcacttttctcctccccctcatcttcttccccttcctcctcatcctccccctccttctccaccttctcttcctctccttcctccccatctccactctacttcttatccatctcttcctcctcctcctcccccttcacttctctcctcctcctcatcttccttctcctctttattcccagttccagggaagagctcaaccatatagactcaaactataaacctgggagacacctccacctccttcatctggcaccactgcaccatcccatgcaccacccttcataacacccctaacattcactaagttagtcttctttcctctgccctgtcctggatgtagctcaggccatccggccgtctctctcacaagtgccctgtgccatgcacacaggggactgcatctgtcttttccaccactgtggcctcagcacccaacaaaatgcctgatacaatgcaacaataataataataataataataaccatcatagtacggtcccttacattagaaacttatggacaggcattgtataaacgtcttatgtgtataactcgcataacaattctctagagtgagtattattattaccattattcacaactgagaagaatgagcctcagaggaaccttgcctgaggtcccacagctagtaagtcccagcaccagaactggaaataggtcagctccatctgaccccagagtctggtttcttaattcttaggctgtgatgcctccatgggagcttagtgcagatttgctgattaaatgaatggatcactgcaacctctcagcagtctccttgcccccagctgcgctccttccaggtcatcctccatcctgtagccaccacagtaggtccttaggcatcagtctcttttcctgcttaaaatcttcaatgggcctcaggatgtagcccctccctccctctccatcagtgcctctcttcactgctggtcagctctactgagctgctctaatgtcccctgaatctgctccgtgttgcttcatgtcttgggccattgcacaggctgaccttgctacgctgaatgccccctcctctgttgcaacccatctggagctctctgtgcagaccttacctcctcttacctgatcctatcagcctaaccaagatgcctgtctgttgtgtccctgtgtttcctcgcacttatccaacaggtctgtcatggccaggcactctcgctctctgcttcattaaactgccagttccttgaggtacagggggcattttgcccactctgggctctccattggccagccccatggcttacacataaatgtcagtgaccgccatcaatgcctctttgtgttaatgagctgatccaataaagatatcagtgaacaaagacacaaaaggcacaatttacatgggctgcaggaatccccatcagagaaaactcttcactcttggagagacaacatgaccatgtagatggatgatttcaaccattggggagcatcatgatcgcccagtggactttaattaaagcacagagtcctggaccccaccccagagtttctgagtcagtgggtctgtgaaaggaacagggaaagaggagtctggaaatgtgcatttctagtaagtttccaggtgattgtgatattacagacccaggagccacatttcgagaaacatttcttttagaaaattctagcaaagaacagtagtgtccagtaagactaggatgaaatgcaggaagagaaatgaaaacaggcttctgttccctctcgagggtgtaatgttgcaaaccttactgtaaagccagcaatctgaacaagagcatttaaggggcggccacacccggtccaacgtccgtgttcaagtgcatcccggcctcttgtagaggaaatcctggcttcctatggacacacgcatatgggaatagccacactcaggcccaggctgcagacaccagacgtctgagtgcagggcacaggtgttcctgagatgccccgtacaatgggtcaccaaaagctgactgagtagcaatgcaaacaaagaatgacccctcctcgccggccgacgggagcggctccaggcaaaccaatggcattcccaaacagcgtgaacagggaggaaacaaacagattcatctctgaaatttgatacccgttccagacacaagtagcaacaaacttagcgacaaagctgtcaaaatatgttccacagcctcattggcaagagatctggacacacgaaagaaattcagcaaaaccacatcagttgccaaacggggaggtttgacagtgtgttcgggaatacatttagatcaaaacaggaacacgtccaaaggagcaagtgtctccataaattattatgggatgattagaaataattagtcagtgatttcaaaatattacgtacatttttcagtggtattgaggggacgtgttatacaacgtgggattttgtttttgcattggggttttctctttttttcttattgctctctggcagtttgtaaaaatgggggccatggaggcagtctcacaccatgcaaatccctggggcttaaaagaatacgtttttaggcaaccggattcctttgcaaagcttccattggaagtaacatagcggggaaagagccttgttcctttctgggcttctttgtaagagtcagtctctagttgctgtccctgggttagagtttgttatcaatggggtgagaggatttacattttcaaaggcctctaaaggtgcctgggccagctcctgattctataaggctcagagaggtggagggaggcactcaagctcttgggaaccagaaccaagagccgggaaccagaaccaggaaccaagaaccagaagcaaggctggactccctggcctcctgactcccagactgctatcttgggtcagcagatagcaagaaccagaagggtccagtggccttaatgaagaaaccccactctagggagagttctgtggggcacgtctgttcccagtgctctgccacattgggggaagatctcttgtccaggccacaaagagacacctgatggttctgccccaagagcctcctgccagacctaaaatagccaccccaaacctggaaccctaagagttgacaatgctccttcaagatttagaatcctgggaaggcaggcctaaaagggagtattcttttctccccattttacagtggggcagggagagtccggtgctgggttctgcacagagcagagtgaaaatcccagccctcccaagtccccatccccaaggggctcaggggaacccactaaagcacaggccactgcccctgatggccctagctttttctgccttctactcaagagttaagacttaacatcctgctaaggggtattaacttttaagttgccataaaaccaaataattatatttatctatttgttttaactctgggcatggctaagcatacatacggtatatgtacacctaaaaagccagcaagcacgcctgctgcaaggggcactttgcaaaatgaggcatgaggaaaagagtcaaatctatgtccctcttctcaagttccatttgcagggagaagaagagaaaggaggaaaaagaaaagcaagactttccgcacagaagcaggccttcacagttacggccttttacaagatgatcctgagctatgtttcctgtctctgagggaggcaccagcatataaaatggtagtgaatttgcattacttccaatccatcattctctgggtatgcaggaaaaaccaggggacccgctgcaacaaagctcagccttcgtgttgacagattcttatttaagtgactatgaatacaacaattccacaaataatttgtcaagtgtgtggctgaactggctctgaaccctgataaataccgactctccttccgctacaaaagcagcgtgtttcgtgtgcggacaccgtggagcgggcacaaggatttaacaatcaatgctactatatttctctcttctttgtggcttagcagaacaaaacacagaaacaactttgaagggtgccttttttttttcctctgtgttaagtacccagggcagcaaggcttggagatctacatcacaagctgcaggctgatggacaagggggtttcttggcagatgacgtggatggccccctgcccgcagaggcctctggcttccgctttgaatagggtcaccctaggcctcaggctttccaggtagctggcttcagcactgcatctggcaccttgtttgtagcctgggccgtaaggatgcagagaccatgcaggacagtgacagtgcacggtggccctgccgtcagacccacgggtctagaagtgcctggaagaatgggtgacacatctccttgaacaaaacgtaaacctaatcatctttgaagactgcaatatacacctaaatgtctcttgcagatgtaatttaggatgcattattaatttatttttcataaagctccccagctcctgagagggtgagtgagagcacagagcctctcggatgataagcctcgtttgtcagggaaaggcgggcacaggcataaaaacaatttccctcctaaaaacccatccaggagaaggcacggactcttttcagggaacgaatcctcttgaaactcgattattccagacgttttaataaagtgccgacctctaatgggacatgaacactcccgtgccatttgcaaagtgaagcagtaacttccccaggctggatggccaggagtcaggaggggtgcctatgcatcaattacgcatcaattacagggaaactttttgactttgggacagtggtgcctatagaaatcattaagaaagaattaactcattctaatacaaaacactaattatttattgtttataaagtaattttaaataacgcaaaggctcatgcagttgggccatcatgattttccagtcattaacttaaccagaatttgcattttgggactctagccagtgacttacatgcagtccttaagttatttttcaaacaccctgtcctatcttaatctattcatcattaatcacatttggtcactttacatagagaacactattcagatgaaagataaaagaaatacattaataaaactaaagcaagttggaatacttcaaaacataaggtaggggatgaatatggttatcaaagcaatttatacagtgtgcacttagtgttaaagtgagactgttaaagtgggggagctgttgcttattatttaaaagagatggtaaggacgagctgggcttttagtgcatcagacaccctctctcactgttcagaaatgagaggatgcatctaagagggtctcaggagtggctttgccttccgcagttgaggcaggtcaaaaaagccgggtggtatccaggcacttctccaacccaagatcctgccaccggtaactacaggttggcctggtgaaggcacagcccctggaacactcagaagccactctccgggcagatccatccatgctccatgctgtgactctggttttcttggggttcacagggagctcacgctggcccccttcagtggcaccagcagcaacttgactggtcctctgggacatagggaatggtcttctgtgggttcctggacattctgggcacagtctccttcttggagcatgaacaaagctcatgggaccccggcagtcaaccctggtacatgcctcatgggccaccgcccagacaccatccctccccaggatggccttcaccatcatccctgcccaggggagtgtgcttgcttcccagaccaagggaggagaagagaaaggagtgggaagggagacatgggaggaaaaccaatgcagggagaggatgaggggaggaaaaagctatatctgctgccacttccttcccgggcagaagacctcacaaatgaacctgcaacattctgagccagccagggccacggccttatctccacactcacaagcagtccatgctcccctgggcagagcccatgccgagggccaccctgggtggagaaagtgtctgggtggtggcccaggggcatgtaccaggctggacctgccggaatcccatgagaactggtcagagaagtgtcatgcccctagggatttctgcttcatcctaggtgagagcagggatcagatcacagtggggccatgggttctttgctggactcagggtcagactgacatcttcagaggaggaaagttgattccctgcacagcctcagagctgggaggggaggggagatgattaccccaaagccagctggtgctaatgcggcagccagccacacttcggtaagtagatgtaaagctcagtttgggagcaagcactagggaaccctgatgaccagcatagttttcatattggatataaaactaagtggggcagacaggagccaaggagagagaactttgagaatgtaattaaaacgttgtaaatatattttgtttgtttgtttgttttttgagacagtcttgctctgtctcccaggctggagtgcagtggagcaatctcggctcactgcaacctccacctcccaggtttgagagattctcctgcctcagcctcccaagtagctgggactacaggtgcccaccaccaaacccagataatttttgtatttttagtagagacggagtttcgccatgtaggccaggctggtctcgaactcgtaacctcaagtgatccgcctgcctcagcctcccaaagtgctgggattacaggcatgagccaccgcacccggactgggaagccatggaagatttcaaagcaggagaaaagtggtccacagtgcatggatggctgcaggttttccataagtgttctacggtgcggcacccgggctacgatcatcaacaaagttactgttgacagaaaggcagccctgcacagacaggagactacgtctgcttgattcacctctgtattttcagcacccccaacagctcctggcgcatagtaggtctagtctgcctgcctattaacaggatgctaaataaaactaaatacagtggaatggttttaatgatgctaagcacagttcactgcttcacactgaaaggcttggatccagatgtctccaacaggcacaagaatcctggaataaacagtttggattgctatctcataccctttgggccagaatcatgattattttcctcataacacatttggaagcccagacatgtgcagtgctctatgagactaagccatggcctaggccttgctgggaggaaggggctgtctatgcatcacagcagaagctgatgaagggacgtcccaccgtggcccataggaccgtaggccatggctcacggaatcgggtggtagacggcactggatgagcatgcagggaatgtgggcgtcaggccttggaacacttaggtcttgcctaagcatcagaatacagggtgtgccaatgctctacagtcacactctttaaggttgtgtcattgctgtgagacgggagggagagaagatggagctggggaggagctagccatgtcgggggcaagacagggacctgggaaaagaagtctaactttgaatagggctgctgacctggcaggggagacaggccctctcaagggtctagcctctgatggccaacatgtactggtcagcacagctcctctaatccctaggggacaatgtgatgcaagtgtccccatgtctggcaccacaagaccggtctgggagtgagtttgtagtcagagcacctggggtgccatctgaataaagaagcgaaagaccatgaaattaaatatttacttccatggcatgccccatcttactggacctgtcactccaccaaaacagaattcaaaagcaataatgccctgcccttgtctcggagaatggtgggctgccgtgtggtgttgagatgccatcactctgcagtttcaccttgtcatttgagctcaggtcaaagaatagaatcattttatgcgtgcctttcaaagtgtctcccccaagtttctttcacgcaacaaaaatgcctgccaaaagaaactggtttctgaagtcccagtcaaaaaagtagtaatgttctatccacacattaatgattccaaaattctccattatgaacaatatttatcaaaaacagcccactatcagatgaaagatgtgcctcatcttttcttgtcaactaaaacattattcactgaaagtttctttcatatctgtttcaggggtttcagtgtcattttaaattgcaaatcaatcatacatctcgaagccctagttctgtaggggagattaacgctctggctaaaattgtttacaaagccatttgtaaaccctctgcagatgcagatgaggcaagtttaccagtttaacattgttgatcccagagaaagccttaagcaatgacttcagagggcaaaaaaatttgttcatttatcattattgtcatgggctttcgcaaatgataacaatttgtcttcatcctatttttagacaatgagccacaatagagtccagaaagccattttgccagatgggagaaggtgctttcattgcaaaatgttgtcttttctttctctgccctataaaattggcttaagtgagaaccaaggatatgttttaatgtcaggattcccagaagacataatgacatacaataaaagcattgccaggctcaggaaggatgtggttcaaatgcattgaatactattttcaatctaaaagagtgacttctggggtagatagaagcttagtaacagtgtggaagatagttatgggttttagcatgctttcatcctttattaatattccccttttttaaatgaaacactgcaataggaagcccaattacttctcattaagatgaataaaaatgttagaataagctggacataaaataaacatttaaagtgatatatggttaattcctccgagctctgaaccactaatcaggaactctctatggaagagaagataagaaaatccagttttcattagaaacgttgcagattctgttgcatttcctcaagctcctggcttgttcacatcagctggtttctggcagcgtccttggaaggagggctgctcttatttctgggtctctggcagcctgggtctctaggagtggccccttccccaaacagcccttcccaccaccctgctgggatcgatgcatcggctccctcagccctcctgggctttgtaagcttgtcatggataatcattttacggttagtctgcctttagcacaaaggaatatttcacctgtgttttccctctatggagaacgataaacagacaagccttacaaagatcctgtaggaaaatgtcgacaccagggacatcctatgtggtcctttttggtttggatacagggccagaggaacgtaagacttcatttctagaaggctttattgtagatctgttattttagcaagcaatactattgattgaaaatactactgttactcactggatatactttggagaaacatgagagctttaccgagcattaatccatctaaaagcgaatttccaaatagtctgcatgcacacacacgcgcacacacacacacacacacacacacacacacacacacacgcatctctgaggtgcccaagagcagaggctctcgtttggggagcaaagggaagctgatccctcagatgggtcgttggcatgtacagtagggcagtgactgtgtggagctgatggcctgccgagactggttgccttctttaatttagcaaactgggtaatggccccgtttccatgctcttcgtgctgtccgaattgcagatccagctggcagaagcagctcctccacctgccatttccttaaaagcaaacaaggagacaacttttcagtgtcatctctatcttcatcttccttgtggctctttacttctgatcttaattgcagtcccattcgcaatgccctcagccagcttgccccatctgcatcaaacacacctcgctcgttcctttctctgcccttcctctgaaagctgaatctgccttccagacaccactctgttcccagttttatggaggtctccctagtgaccccagtctcagggaccctcctcgtccacgttctctactgcccggcttgttagctcaatcagaatagggacagttttatttcgtaatcaggactggtttttattgttgtcatttgtgtgatgtttttgttattgctgatagaacagtatttatgcatttgggattgtattaatgattttaagaaaggctaggacaagacatggttctataagtaaaatgcttttaaaagttttattttgtgtgataatttaaatcatagaagcattcatttatttgcctatcttttttcttttttttgaaacagggtctcactctgttgctccgttgcccaggccggagtacaatggtgtgatcatagctcactgcagcctcaaattcctgggttcacgcaatccccctgcctcagcctccttagtagctgggaatacaagcatatgccaccatgcatggttaattaaaaaataataataattgtagagtcaggggtcttgctctgttacccaggctgttttgaactcctggcctcaagcattccttttgcctgggcatccaaaagttctgggatgacaggcatgtggcaccatgcctggcctatttgcctgtcctcttattgcaaagccaagtcttcttctaggcttatgggtctgctgattggtgtttcaggcactctttcttatataaaccacaaccataatacataacctacaaaattattacagtatcttcaaaggggataaaaaagatcctcacaaggcaaaataagtgtgaaattcctccagatttttggggccagtctctatctcttacatttgcttctcacacctaattttctaccagtctgcattgaatctttacaaagcaccacatctagttctcatagacaccactacgtcctttacactcttatcacatctgagcagcatatatatataatatatatatattatatatataatatatatattatatatatatattatatatataatatatatatattatatatatattatatatatattatatatatattatatatatatatatttgttgttgttgttgttgttcttttttgagacagagtctcacactgtcagcagggctggagtgcaatggcgtgatctcggctcactgcaacctccgcctcctgggttcaagcgattctcctgcctcagcttcccaagtagctgggattacaggcgcctgccaccaagtccagctaaatttttgtatttttagtagagacagggtttcactatgttggccaggctggtctcaaactcctgacctcgtgatccacccacctcagcctcccaaagtgctgggattacaggcgtgagccactgtgcccggccaatattttcttatatgacatacttacaataacaagtacagttgacagattctgattcttggtaaacatacaacgtgtgactggtgggaacagaagtgtgcagacattctagagtttggaatacttatgggagccctaaatatcagttgcgattttacagaaggaacagagtgtatctgttatgttggttaagttgagctagtctgttgagttggttatgcatggaccaagccaagaatcttggttgtgttacacttagacctgggttcaaatcctggctctgagacattggaaaagttagcttctagatctaagcttcaattttggctgggtgcagtgactcacacctataatcccagcaccttgggaagctgaggtgggaagatcacttgaggccaggagttcgaaaccagcctggtcaacatagcaacaccccatctctacaaaagaaaaatcaaacttaaaacattagccaggaatggtggcctgcagtcccagctacttgcaaggctaaggtgggaggatttcttgagcccaggaagttgaggcagcagcaagcagtcatctcaccactgcactccagcttgggcgacccaagagtgagaccctgtttcaaaaaataatcatcatcataataataagcttcaatttcctcatctgtaaagtgagggcagaaatggctccatagcatagcaaagttgtcaagagattaagttagatggtgcctgtaaagtgtttaatacaagatctggcacatgggaggtgttcaaaataagtaagcgctgcgagtactgctgctggtggttccattttattctcaatgtggtaaaatacacataacgtaaagtttaccatcttaaccatttttcagcttgcagctcagtagtggtaagtgaattcatgttgtgcagccaacctccagaacgctcttcatcttgcaaaactgaaactcaatactgattaaacaacacctctgcattctctcctggtccccagcccctagcaacccaatcacgcccatttttgaccctgtaactattgtttctgccatcctgcatttcttgttactctgtgagtccctcccattcaagccaccagaggctcattgcctcaaagaagaggtgggctaacagaaaagagaaaaataactctcttaggagctttcacgtctcaagcccaagcctggaggagtagagaacaatatgattgatcagtgcaaggtttcctcctccagagactaaacgaatgcagtggagggaagaagaggaaaaggaaataaaaagcttaggtgctggtgggtccccaagaagggcctggtactcagctatccctgggattgagcccgagcaagaagataagaatatttgcaggctacccaagcaggaatgaggcactacccagcaaagacacaacactggacagagtgatgacctactatggggaccacaccaccctagtcctaaagacaccttgtcattatgtaagattccaggaaaatctagaaagcccacaacgtggctaacattgttttcatcagaatgaaaaactgaggacctgaattaaaaatttagctgaatcaggccagatgcagtggcttgtgcctgtaataccagtgctctgggaggtggtggtgggaggatcacttgaggctaggagttcgagaccagcctgggcaacatagcaagaccctgtctctaaaaacaaacaaataaacaaacaaacaagcaaacaaacaaaacaaaacaaagcaaacattatccaggtacagtggcatgcacctgtagttccagctactcaggaggctgaggaaggaggatcatttgtgcccaggaggtggaggttacagtgagctatcattatgccactgcactccagcctgggcgacagaacaagaccctgtttctaaaaaaaaaaaatttttaatttacctgaataataagaaaagcactcagagatattttttctgcactcctgatcttgagcactggggctaaaagctgctctattccatactctgccccctttactcgggtcctgggatgctagtgactacacttcacactgtctcagtctactgccttgctcatacttcaggcccaaggggaacaacatattcccacagcttatgtctgattggacaacagaggtcatgtccttacccatgagccacatcctgtggccagtgggatgagatcattctgatatgcctcagctagagccacatgccccatgatcagagctggtaaagcatcaaaatcccttgaagcacatgagctatatgagaaaagagtaggaaccaaaaatataattatttatctattaccaagagaaggaggattgaatgaatgcatttgctgtatttccacttggtgactgagtgtcctggtgggtctgtgcctgtgaagctgtgtgcatgcatattcatgcttgtgtgtgcagtggggtatgggtgggagtaggtaggtaggcaaaagtcacccaggtattgtcagaaagtgagttcaggctgggggctgtgactcttgcctttaatcctgacaccttggttgctgggtgtccaggggtctggacagtcaaccaccaagtggaaatatagcaaattaatttgcttgttaatattaataataatatcaataaatattaggcaaggttttattgaacatccattgggtgccaggcagtgaatcaagctaacacaaatccctttcctcaggactcttacatgcaggaagaagatatgggttcaaagggagaagacggatctggctggaggaaaatgagctgtggctagaggaaagaaggatcgggagagagagaagagggttccagagggaagaaagagggctctggagggaggaaaataggctctggagggaggaagagggctctggagggagggaaagtgggctccggagagatggaagtgggctctggagggaggaagagggctctgaagggagggaaagtgggctccggagggagggaagtgggctctggagagagggaaatgggcgctggagggagggaaatgggctctggagagaaggaagtgggatctggagggagggaaaagggctctggagggagggaaatgggctctgaaggcagggaagtgggctctggagagggcgaagtgggagctggagggaggtaaatgggaactggagggagggaagtgggctctggagggagggaactgagcactggagggagggaagtgggctctggagggagggaaatggacgctggagggagagaagtgggctctggagggagggaaatgggtgctggagggagggaagtgggctctggagggagggaaatgggtgctggagggagggaagtgggctctggagggagggaagtgggctctggaaggagggaagatggctctgaagagagagaaatgggatctagtgggagggaaatgggctctggcaggagggaggaggtctctggggggaggggagaatgctctggaggaaggaaatggactttggtgggagggaaatgggccctggaaggagggaaatgcttcactcaaatgtttgttcccttggcctccttcttcttcagcaggaattacacgtgttcctggcaccggcctgccaaagcacaggctcattgtctcctcctaaacaccaggacaagcttccagaaccaagcctcgccaccataagaggcaactgagaccgtttcctagaatgaaagtgatccgtatgttaaaaatgcaataagcaagtcagcagttttattgatttttttcttcatacctccttaaccaattagtttgaaacagtgtaaaatggtctatgtgacagattgctcaacagatctcacttttttcgggagtaagacagagtctcactctgttgcccaggctggagtgcaatggcataatcatagctcactgcagcctcaaactcctgggctcaagtgatcctcccacctcagcctcttgagtagctgggactacagtcgtgaaccaccatacctggataattttttatatttttgtagagatgggggtctcacaatgttgcccaggctgaccttgaactcctggcctcaaccaatcctcctgtcaaggtgctgggattataggcgagagccactgcacccagcctgaactgactttcagacaatacctgggtgacttttgcctacctacccactcccacacgtaccccactgcacacacaagtgtgaatacacatgcacacaagtgtacacacacagattggctgggaccacccaggattcaatcctccttttggcaatagattctgaattatacttgtagtacttattctttccctatgtagctcatgtatgtcaatggattttgatgcttttccatctctgatcatggggcatgtggctctaacctaagcatatcagaatgatctcatccctctggccacaagaacgtggttcgtgggtaaggacctgacttcagttgtccaatcaggcataagctgtgggaatatgctcttctctgctaggcatgaatgaggaaccatgaggcctgagcatgaggccaggagcagtgttaagaccacaagaggctgagagtagggctgctgagagtagagtggttttcagataagttctctgattctttaacatgctcccttcagaaggtggagcttaatgcctccgccttgaatgagctggatttgatagcctgcttctaatggataagatgtggtaaaagtcatgctatgcaacttcccagacttggtcataaaaccaagagcatccacctggctctctcttactcttggatcctttgttctggagaagccagctgccatgttgtgaggaggcccataggggaagaactgagctcccctcccagaaaccctcagcaccaatctgcctgccatgtgaatgagttatcttagaagcacatctccccagttcatccagaggattgtagaatcaactgacacatcttcactgcaccctcttgggagatttagagccaggaacaccaagctaagcttctcctgcattcctaacccataataactgtgagatgccaaaagtgttttgttgtaagtaactgagtttttaggtaatttgtgacatagcagtagataatgaacacagaaacccataccaagacaaacaatcattaagttgctggatcaaccctcacctgaagttcgcttgatcctttagacttttcagttaagcaggtcaaaaaaagtttctttcttgtttaagccaatttgagttgggttttctgttatttttccttgaaggcatattggtagatatatttccaatcctttcctctggtctcagccttctaaagggagctaaaaatacagattagcttattttatttaatttcaaatccttgtttcagttgctcctgcttgtaactgtggcatttgcacgaatggaagcagatgctgttgcaatctccatgcagataattccttctctgggttaaggatgtaataaatggaaaggggaagataatttacacctgaatatataaagagtctacaggtaataacccttaaatgtatcctgtctgtatatagtggttgttattttcctgcccaaagctgccaaagagaaggagagagaaaagatgttaattcttacttgacagtgggccttgtagcattcttcaaaccaaaatgaaaaacacagagaactatgtgatggttacaggacttacacgcctgaaaacccagtgttccctttctctgtcctttggaagtagtttgttttgtttgcttgtttgtttccttgcttgtttgttttgcaatgcaccgaagagacagtaggacttccctttaagaaaaaaaaatttaaaaatgatttgtgcatttgtatgtaacaatggggaaatatcacagcaagatagcatatgactcatgttattgacaatgttcagaaggatctggaagaaagaaatgaggcttatggtagggtctggaatgcaataaatctaagttaaaaggaggtgctggataaaatacatctccaagagcctttggctgtcttccttctctgaacaaaactaagattggccaataacaattacagtacctcatgtatcaactgtggatattgtcctactgcatagacatggccatgtgaaatctatagatcgagggtctacttacacctgataagacttgtcagtaaattatatctttattattgcttctaggttcccttcctggatttttaaaacttgactgcctggattactggctctttatttaggaagaactttgaaatttacttatatgaatttcatcagagatatccttaagactcattgcatgtttcaaactaacttattttgggggatggattagggttgatgtttggatttggagtcctaagaactcaatatagatctcactttccccttaatgctaatataaccctgagaaagttattgaatctctccaaacaatagcctttcatctgtaatattaattattttgtttgtaataataaaagtagcgcacactcttatataacttactatgtttcagaccctgttcttactattttccatttcttaactcatttaatcacatcacctaatgtaattctttcatcccaaagctcagcacatattagatactgcaatgacagtatcccctttcatttagaaatgaaatattaaaaggcataattaatagacggagcacaaaattatctattgtaacatttctcacacatcttggtgatgctagtctaaaaaatatttttacacttatactctgtgaccatttttttcactctctcccacacacacaggcacgcacacacacacacacacacacacgcatgcatggtgaaagagcacgatttgtgaaaatcaatgtatcattgccttttctataatgtccatctctatccaatccacctggtgtcactggggacatcagagagaccctgtgcttcaaagacaaatgccatcttaattggacaggtctctttttaacatttaacatttcctgttggacctagcttacactagtcaatttttttttttaataaacaagggaaggaaaaaaaaaacatgatctaaaacccacatctctaagttatcagtgtttggtgcaaatgcgttgattctagcattcacgcgggtgcaatgccatacatgggtatcagccatattagacacagggctcagggctgtgtgcaacctgcatcagtgactgaatatgagtgacaacccatgcagcactgttaaactaccacctcacatcattacccacaataatagggactcaaattggtggagatgacccaagttctgcctactgagacccaagttctctgtggaaacactgaaagatgtcttgctcttgatggccagtttgatgcaaaatccctgaggaagtggaatgcaacgtgctaccttctcttcaaattaaacccaggctccaaagccacgtggtgaacccgctacgaggacagcatgactcaggaagaaccctgcttatggacttcgatagcagagaggcctggattcaaatatcagctgtcacctgctcttttctgaaccaatgtttttttgttaggattagatgagatgatactgatgtactctgtaaacatagaaggctttcagtaaatggcagaagaagcaagaaaagtaacaataatatttgcctctcctttcctacctcttcccttgagctccaaatttatgcagaactcaacctaataagtcagactcaccatctagaccttaaacttgcaaaaaccagaaagctgggtcatcaccacatcctctcctctccattctcaccaattgtgtagctaaatcaagaccttcactggactacagctttggactttgcttcagaagtcagaattttcttccttcttctaaatagatactgaagcaagatgaagaacacaaaaaaatgtgcttaaaaatatttagggaaattaaaagataaatgcaatgcaagactccaagatacatgtgaggctgtcaaaagcagctgagattgaggggaagccacacaagaggacgtgaaaagagatgcagcatgtggcctcaggatcaaatggtgccatctttcaggaaggacaagcagaaagatattttttaaagaaggactcaggtgagagtcctgaagtgcaaggttattcctgttttcaacaatgggaccaggtaatagagcaaactgcgcttacgctcagaacatggttggcctggcttgggacaaaatagcagagtcagccatagttgcaggaagcagtctgtctctgaggcaacagaaaacagaaaatatttttatttatttaaaaaatgtagctatataagttgtacaatatgatgttttgatatgcatacatatagtgaaattattactacagtccccaacttatgatggtttgacttactacagcttttgtcatggtgcaatagtgattggcaaccacaggttttcagatttaagcaccactggttctttgaccaaagatactctgcgctgtattttcacgtgatgggtttatgagaatgtaatcccgttgtatgtggaggatcacatgtgtacagtcaactaaatatcccatccattgtctcacgtagttacctctttgtgcatgtgtatcatgagagcaactgaaatagactctcttagcaaattttccagtttacaattcagtattcttaactatagtcctcatgctgtacattagatctctagacttaggcttcttccataaccacagctctgtaccctctgatgaacatctccccatttcctcccacctgcttgcccatggaaaccacccttctgctctctgtttctacatattcagccttttttttttttgtctttttgagacggagtctcgctctgccgcccaggctggagtgcagtggcttggtatcggctcactgcaagctctgcctcccgggttcacgctattctcttgcctcagcctcccgagtagctgggactagaggcgcccaccactgcgcccagctaattttttgtatttttagtggagacagggtttcaccgtgttagccaggatggtcttgatctcctgacctcgtgatccacctgccttggcctcccaaagtgacatattccacatataaatgaaatcatgcaacattgctctttctatgtctggcttatttcacttagcataatgtcctccagtttattcatattgctacaaatggcaggatttccattttaaggctaaataatattccactctgtgtgtgtgtgtgtgtgtcactttttttaaatccattcctctgtccatggataacttaggttgattccttatattggctattgtgaataatgctgcaatgaacatgggaggccaggtatctctgaggcagtgattttattttctttggatgtgtacccagaagtgagatacctggatcatatgatgctcctatttttgagaagccttcatactgttttgtataatgactgcaaccatctacattcccatcagcctcataatggggtacaagggttcccttttcttcacacccttgctggcattgttacctctcatcgttttgacaacagttgttctaacaggtgtgaggtgatatctcattgcagttttgatttgcaactcagaagggaaaatctgacacgtgagatctgaaaggctccccatcgcccatcccttggtcctccaaggccatgccttacctccacctggaatttctgctagtgcctagcagggaaaattaaacacatccaactatgagtcataaaaggagtggacatgattcctataaagaaatctcgaaaggaaaaattggaaaagagtcacaaaacttaacaaaatgaaaaacgctcaccagaaattatatttccatagggtaggtaagaactatgaccgaatatgtggtaatgacttaaaaaatggaaaatgattacatctatagaggaagatttttaaaaagaaacaattatctcatgtacattagcttggtgttaaaggatgtcattcaaaaatgaaaaatctagtgataaatcacacatatacatataagcaatgaggtattgcattagtctgttcttgcattgctttaaagaaatacctaagactgggtactttataaggaaaagtgatttaattggttcacagctccacaggctgtataggaagtatggcagcttctgcttctggggaaggtgcagggtgcttccaatcatggtggaaggcaaaaagggagagagatgtctcacatggccagagcaggaggaagagggtgggggtgccgcacagttttaaaaaaaacagatctcgtgataactctatacacaaacagcactagaaggatgatgctaaaccattcaggagaaccacccctcaccctccatgatccaatcaccttccaccaggccccacctccagcactggggattataattcaacatgagatttgggtggggacccagatccaaaccatatcagatatatactagcaaactattacaaactaaaattgggtgatagaagggaaaggaagagaaagaaaggaaaaacaaatatgttaattgtatcattaattatggcagggaatgaagaagagattgtctaaagaaataagaactaaaagtctcatataaagttataattgcagatgttataactagtaagaaatacaaacctttttaaatatcaggagaatcaaagcacataaaataaatgacatagtagaggactttaaaaaacaaaaaatgtaatatacaatgatatctcagaacctagaccaaatatacatcatggaaaatgtcaatgggctcaactgatctatcagaaacattttcagttgtttgtcccacaaagcaaagctggcctcagctgtagtccaaagacacattagaccatttgttcagcaaagttgaatataaagggacgtttaacggatacccaaatagatgtaaacaaaaggaagcagaggccatactcttcatatctgagaaggtagacttcaggataaaagcatgaaatgagacatacaagtgcacttcataattctaaaggggagagattcacagtgacgatacaaacattctgaatacccacgcatccgaagcaacaagaatgcagcaggaattacaggagactcgggagaaaccggcagtcatgctcgtagcaggaggccactcgccactctcgcccatgagaggccaagtggacccagaattagagtctagcagtcctcgataacataagtactaagacagactgtgctgagtcatacagaccacataccttgacaatagatcacttattttcattttcaaatgcccatgaaaacatttatagaagaacagatcacattctaggctacaaagaaactccaatacatattttaaaaatcagaaaggtgtagatattattctctgatcataatataataaaaacagaagtaaataagatcagaaaataaacaaaatcttttccacctgaaaatttaaaaaaaaaaattgctcttaggttaaaaaaaaagctcctagattaaggaaaaaacacaacccgaaatttaagaatgtctttaaaataatagtgaaaatactatatttcagaaactatgaatacagctataaaacactctgaaaaaagtaataaactcaaaaatgtatatcaatttttaaaagagagaatgaaaacaaatgaattaggcatatgacttaacaagttagaaataaaacaaaatgataagggaaaaatcaataaagataaaagcggaaattaataagataggaaactagaaatccagaaaactaaagaataaattcccaagctgtttctttagagtaaggagaagaacaataagataagaaacccaaaacaggtataagctttggcaaattttattaacttttaaaaaaaatcagctgatctgataatgcttaaactattctagggcatttttttttaaaaaggaaattatcaaagtcttttattgaaacaaatacaacaatacacccaaacctgaaagagattggaccctaaaaaattaaaaaacaaaaaaagtctaatcttattatgtacattggtgcaaaaatcatctgtgaaatttaaacaaaccacattcattagatcatcaaaaaacaataagctataaaaatggggttttatttcagaaatttaacaatggcaaaataatacaaaaatccactaaataagtcaatctgctactagatttaaggagaaaaacatatgattatctcaaacacgaacaaaaagtacttgttaaaatttaacaattcttgattatataaaggaacagcaaaagttcaataaaataagactaataaataaagatttcctagaaatgtatacaaaaggaaatggccaagttgaaagtgggggccaggaaaattcacagaaaagaaaaagtatatgattcaaacataagaaaaaaaagaaacttcgcttcactctaatgagagatcccccaaattaaagctatcttgagctgccatttttcacctattgaattggcaaaaatccaaaagtttgataacactctgctagtgagattatgggaaaacagataccatctattgctgttgggaatatgaattggtgtaacccctgtggagggcaaatcagcaccatctatcaaaattacatatgtatataccctttgacccatcaattatacatttgggaatttatcctccagttccacttgcacacgtgtgaaatgatgtctgtgcaaggttattcattagtgttgcttgtaagagcaaaaatgccaaacaacctaaatgtccatctagaggaaactggttaaataaattatggtacatccatacactataataccacgaagctattaaaaacatgaggacactttccatatatggatatggaaagattgccacaacataccatgaagttaaaacaaataaacaaaagcaatgcgtcaaacagcatgtacgttgagatgccttttgtgtaaaaggaaaaaaaatatgtatttgtgttaggttgcaagcaattttgttgtcttaagaaataatccttcaaatgttgactccaacccatttttttctggttgatcacccactgttggttcctccaacttgcaccccgctctgaccatacaacctatgttctagttacatggagccatttgacagtctctggatatctttgtgtatattgtttcttctgcctaaagcaccaaggggcctgtgtctgccccatgatccagttccaatagcacctctgcactgggcacagagtgagtggctcccttctccatagtcacgtgcacattcttcgtttttggattgtactgagattctttgctcagatatgtaactccccacaaaagaccttcagaaacccaggaccatggttcatgtattttactttcctatgtgtccccatgacttttccagcccagatcacacatgcgatcaatatgctttaaatgatgaggggttgtaaacagcctaatgtccattggtgaatgaatggatcaacaaaatatggtatagacataatggaatattattcagccacagaatggaaagaaatgctggcacatgctataatatggatgaagcttgaagacattctataaactggaataagccagacacaataggacaaatgttgcaggatcccacttctatgaggcacctacagcagtcgaattcatagagacacagtggaatggtggttgccaggggctggaggaggggaaacagggagttactgtttaatgggtacagagtttcattttgaggagatgaaaaggttttggagatggatggtgatggatggatggtgatgatgattgcctaacaatgctactgaacagtgcacttaaaaatgattaaaatggtacattttatgtgatgtatatttcatcacaataaaaagtatgacttaaatggggtacccaaagaatccttaagatcgaaagtctttacccttggttaggtgccatggctcatgcctataatccctgcactttgggcggctgaggcaggaggaggattgcttgagcccaggagtttgagaccagcctgcataacgtagcgagaccttgtctctataaaaaatacaaaaatcagcctggcatggtggcatgtgcctgttgtgccaggcactaagagactgatgtgtgaggattgcttgagcctggggaagtcgaggctgcagcagtgagctgtgatctgcaccactgcactccagcctgagtgacagaggtcctgttttttttttgtttttttttttttttttaaaaagacccacatcctctcatcttctgccaaagaaggaaaaagaaaagtctttatcctgcagaacatttttgtatcctgttcctgaacatggtaaatattgtgcattgcttccctgttcatctgtcaaaatcaattctacccttagaaagctctcctgggacttcatcgaaagctataaataagcggtcactgaggccttagtaaataggctgcaccattcatttgtcaataaatattgatgaccccctaggtggcagacaccaggtgctggggatacagaagtgaaaaagatgggcatctctcctcacctcaaggggcttacccacaatgctgaatccacagacctcttaagtcactttcaagaccctttgcctccaggtccttctgtcaaggaggtcacccactccatggccccctcctctcctctaccctctgtagcagtgttcgcataggatgctgtgcgtccgctaatgttccacagcagagaaccaattcccttaagtaaataaaacacaaaaagtttatgaaatacatcgtctgggtagaaaagcaatgctcatttatatgttttatttgtgagtgggttattgctggggtagagaagtgctattgatttttgtatgttgatcttgaatccagcaatcttgctaaactccattattagttctaaatgtgtgtgtgtgtgtgtgtttatttctttggttattctgggtagatgataatatcattagcaaatatgcccgttttatctcttccctcccaatcctgattttttttttccttcatcatgttggccatgaccttttcaataaaatttcaaaaacaaacaatgataaggcatccaaaaggatcaattttattatattgaaataaaaaaaacctgttcaaagaaaccaggaacaatgttactaaatgctagaacaagagaagagatttgccaaacctaaaacaacaggggattactgtttctagatcatgtaaggaatttctgcatatcaacaaggagaaaatgttaacctaatggaaaaatggtcagaggatatgaataagtaattcatagaagagaaaactttaacaagcacattggtgagatgcttacaatcattaatcagagaaatgcaaattaaaacaataataaatattactttatacatattagactggctgactggtaagccgaagaatgcaacatgttgaagggagtgtgggcatatacaattgtaattcactgattcagggaatgcgattggtacagcaattctggagaaaattgggcagcctagtcacatgtttttttcttggcttggctttttatttactttttcaattttattttactttaagttctgggaatacatgtgcagaacatgccggtttgttacataggtatatatgtgccatggtggtttgctgcacctatcaatccatcatctaggttctaagaccagcatgcattacgtatttctcctaatgcactctctgtctttgcccccaaccccctgacaggcccaagtgtgtgatgttcccctccctgtgtccatgtgttctcattgtccagctcccacttatgaatgagaacatgcagtgtttggttttctgttcctgtgttagtttgctgagaatgatggcttccagcttcatccatgtccctgcaaaggacatgaacgcattcttttttatggccgcatagtattccctggtgtatatgtgccacattttctttatccagtctatcatggatgggcatttgggttggttccaagtctttgctattgtaaatagtgctgcaaaaatttagacctaaaaccataaaaaccctagaagaaaacctaggcattaccattcaggacataggcgtgggcaaggacttcatgtccaaaacaccaaaagcaatggcaacaaaagccaaaattgacaaatgggatctaattaaactaaagagcttctgcacagcaaaagaaactaccatcagagtgaacaggcaacctacaacatgggagaaaattttcgcaacctactcatctgacaaagggctaatatccagaatctacaatgaactcaaacaaatttacaagaaaaaaacaaacaaccccatcaaaaagtgggcgaaggacatgaacagacacttctcaaaagaagacatttatgcagccaaaaaacacatgaagaaatgctcatcatcactggccatcagagaaatgcaaatcaaaaccactatgagatatcatctcacaccagttagaatggcaatcattaaaaagtcaggaaacaacaggtgctggagaggatgtggagaaataggaacacttttacactgttggtgggactgtaaactagttcaaccattgtggaagtcagtgtggcgattcctcagggatctagaactagaaataccatttgacccagccatcccattactgggtatatacccaaaggactataaatcatgctgctataaagacacatgcacacgtatgtttattgcggcactattcacaatagcaaagacttggaaccaacccaaatgtccaacaatgatagactggattaagaaaatgtggcacatatacaccatggaatactatgcagccataaaaaatgatgagttcatgtcctttgtagggacatggatgaaattggaaaccatcattctcagtaaactatcgcaagaacaaaaaaccaaacaccgcatattctcactcataggtgggaattgaacaatgagatcacttggacacaggaaggggaatatcacactctggggactgtggtggggtcaggggaggggggagggatagcattgggagatatacctaatgctagatgacacgttagtgggtgcagcacaccagcatggcacatgtatacatatgtaactaacctgcacaatgtgcacatgtaccctaaaacttagagtataataaaaaaaaaaattaaaaaaaaaaaaaaaattcgtgtgcatgtgtctttatagtagaatgattatatagtagaatgatttataatcctttgggtatataaccagtaatgggattgctgggtcaaatggtatttctggttctagatccttgaggaattccacaatggttgaactaatttacactcccaccaacagtgtaaaagtgttcctatttctccacagccttgccagcatctgttgtttcctgactttgtaataatctccaatgtgactggcgtgagatggcacgtgctcctgtgcttctatcccccacgtttccacacatggcccttagtggacacatagtgagaagttgatggtagcatggtttgacgtgccaaatagttggaggcagttgggttgtccattattggtgtgtggacagacaaaataccgtggttgcaagccatgggtcagatgcagcaattgaaaaaaaaaaattctagacgtacagataccaaactggatgggtcttgaaaacatagtgccgagtgagagaaagtcaacaaaaggttataatgtctcaaccaatactgtttacataaaatcaagtttcacgcatacaaatcaattgtacacattttgcaagaacacatgtagacacaaaaagcaagtataagtcaaacatatcaaaacggttgcctattgggaaaggaaaaggggataaagtgaatgaataaatacaacaaaagcggaccctcgtacagagtgatggtggcaatgccccatgacaaaagagtgagattcttttcgtaaaaaaagaagaaaaactaaaaagacctctgctgagagaacaagggcttccagagagaaagaatagtagtaatcagtgtctcccatgcaagcactaaccaggcctgaccctacttagcttctgagatcaggtgtgttcagggtagacacaacccgctgtctcaagagttgcatggggcttctagctcagccaaagcaccatcacaagatgttcgacactgcaagaagcccacgaggagcggcaccaaccacacaatatggggctacagtgaactccaagggaaggcaagactgggaagaaagacaagcctttttacctgcttcccacctggggcagaaaatgaggtggtggcacccaagagggaagagggataggaggaggatggggagtatctcgttaatctcaccacccactgccttccttgtgctatttcgtgcacaaggaggggcgtcttgtctacatatctggccaggctccaagccctctgttgccagtgagatacgtaagtgtgcaggaggagcagacctggggagcggagagaccaaccctgtattcatcctatggagggagtacctccttctctaagctctgatttatagaagataaataattggcctcagcaggcagtcaggcaggaacacacctcgctttccctgggttgcttctcttgaatatatcatttgatgttgcagcagaattggggttgcacccccatgttaaccgatgccctccagaaagccaggggcagcgagaggccagccatggtggaagcggccttttatgagtgtgtgtcaagaaagcctgtggtgtagcgagctagactgttagagattacatattgacctggctccctgaatttattctctgctggttgtggattgttcacaccagtcccttggaaagtctgccaccctgcagctctcacgatgctgttagggacggggagtccacggggtttacctgtgtctctgggctatctggaatacaggaactggaaggaaaaacacatttggtaaaaatgtagtgcctgcagagggtgggtttgagtggatcctatggattgagctgggagccaggggctggtcatcaattcagaataagacctgtctgaacacagtggaactctagagtgatctgcagtataatttagggcagttctgctcatgactcccaggcctgggggttggaagtgggcctgagaggagcaagcttggtgcccatagctaagtgattagacattatccttgagcactgactcctgcttaggaggtcagcactgctctcccacctgtgtgacggccgggaaggaggcggcacggtgggtctgtaaggtggaggcccacggcttctgccggcatcgcgggggctctgacaccagaatggcatgattcaggaaacaagtttaggagccaatcaccagtttggatgggggctgaaatccctggcttcttcaaatatacaccttcgtaaaaatttaggagattcatgcaaaaacttggaaagcaacccaaatgcaaacccactcacaagcattgagtggaaggaacatctattttaaatgtaataggcccacaattctcacccttgagtagcatcttccaggctttcaaagagcacaaggggaattttgcatggttttcttgggctgcagggcgaggagagatggtctacttctttttgattcccacgggcctccagaaggacttcttggtggtcccagaaatgtcatcgggcgaccaccacagttccacagggagggaggtgaacgaccagggctccttattccatagatgaatgaacgaaaaactggtcttgcaaacctgtgctagcgtgcatttgtgataactgcctgcagctgagacacaagcctgtatctttgctttgtggtattcttttatttatttatttattttgagacagggtctcgctccattgcccgggctggagtgcgatggtgagatcatagctcactgcagccttgacctccagagctcaagagatcctcccacttcagcttcccaaatagctggaatcacagggcaccactgtgcctggctatttttttattttactttttgtagaggcagggtctccctttgttgcccaggctggtcttgaattcctgggctcaaattatcctcccacctcagcctctcaaagtgcagcaattacaggtgtgagtcaccacacctggccttggagcattctcaatcatctaaagttatccctctggacaggagggtattggctgccagtctgacacccttctcctccccctggccatcccccagtctgtgtattgtgtacaactttgagacctctagtatcaagcatactccatgcagcaatgcaataattagcaggacatggcctgagcgacctgaaagaaataatgacatctccaacatgccaaccttgcacccaaggctcggctttcactcccaaagaattaaagtcaacatgtgtttgggcatcaaatcagagaaaactgtcaactctttcgatttgtcagttctgcagtactgaaatttctttctaaaaacagtatccagtttcaagtatgaaagaagggaacgtataatacagatgtttcatgaagtttgaagtagcaagagtccaaaaccatcacttttacattatcagccacctctgaagagttcaaagcatttttgtgaacattttagggcaaaatttcttgacaatagactgtgcagaaattatccttatttttgcaaaaataaatgaatgaactttagaactgataaagttctgctgattcctattcttaaaacccagcggacaaagccacgctttcaaagtagtactcataccttcccaggctgtgctggctctttcaggactagccaggcaaaggcatgcttgcaaacatcaggtgagccaagagaagggcagccttgtaaccctgtaagggtagtggcaaccagaatgttcttggtctatttagaggaggcagccacgatggcactagccaatccctgccaggcaggaatatgaacctctcaatatggccagacaatctgatttttaaggagaaaatggaaatctaataatttggcagtaaaatctgattattgaatgttggcttcttcttattatgatttttaaaatttactgtgagccaagcaaatcacatctgtgagccagacattgcccaaggaagctggcttacaaccacagtcctgagatgtcactactgatagcaatttctatctatgtttaaggaaggaagaagaagaaaaaagagactccgatttgaaaccataaatgaccacagccacatctgcctacttggaaggtgcatcgtttctctccagtctggaataatttctaagaagtatactatgacaggtctgggctggaagctctccctgtcaccatccccacacatccccagaggtctgtgccctgctacaaatgaagcccatccctctctccccgcaccttcctgaaagtttccacatgtgactgccattttccaggagagcctgggggtctagggaagggctgctgctccacgcctgtgttcatgcagttagtagaggagccaaagccacaaggagcaaaactcctgatgtgtcaataattctatataacgaggaagtgggagaaaaagaagtcacgcagactgcccagagatcttaggtagggggtttctgggctttttacaggaagtgggtctggattctagattgatctatgtatgtatgtatctatctatctatcatctatctagccatccatctatctatctatccatctatctatctatccatcatctatctatccattatctatctatctatgtattatctatcatctatctatcatctatccatccattcatctatcatctatctgtcatctatctatccatctattatctatctatctatctatctatctatctatctatctatctatctatctatctatctatctttattatcttaaaggttagcatgatcccagaagctcggaacacttgtggttatgtttagccatgcagccaatattgtccccagagagaagggcacaccccgtaagctgcttcacagtggatcatgagtcctaaaaatataagaggcatggggagtagggtgtgagatttgcagacaaaggttggtattccagaatgttgtgacctctctgcattcagccacccgatggcagggctgggggatcctccaccctggagatgccatgtaggcattacctcgtggccacagagcaaatcctggagcagctgtgagcagggcatttgctccttctctgggctgtggagatacctaagcacacacacaatcttggtggcagcagaggtgctattgagtaaatagaaatggccatggaactcttattacagcattcataggggttaaagaagctaatatgtttgtcaaacaggagggctgagtggacgtgtcctatggcctcccttggaaatggctctttctgcttcagatagtggaaggcttccagacacacagtccccacccattccttctcctggggaagtagccttaacttacacagacagcccgaaagagtctggggacttgtagctcagaacgaaggaaaatgacatcctccagcctggcttaggaacattgctgttcccaaccccgtacaggagacgcctttcttcttatcttcttctgggggattttagagccactcatcatgagtcacagtgaagaggtgagtttttcttacatctgcttagctataattaatgtatgaattgttggcattgtttttctttaaaaaaaaattagaacaactgcaaagggagagtaatgtgcccacccgtggtctgactaatgtcatctcacatatccagatcagtgtatttggttaaagcaatgtgaactgtaaatctgaataatttatcaaactattgaaccacttgtaaaataattgaagcttgagcctagttttgcataacagatttaaactgaagagcaatgtattagcaagatctcaacctctagaaatagaaatggctgtaagagggctgacagtctttatcataaaacacacatatataaagcattcataactggccactgtctttaacaatgacttggtagcatttgcagcccaccccaactggatcctagcacagaggaagggaggctgagatggtggaggaaaagggtcactgacaaaatatttgataatctcagagtttaagggtctggggctgggggagcagagacgttctttcatccatagcataggttagcttgacaattgcatacaaaccaaaggtctggcgaagaccagctggaggtatttagttggcaacggataagattgactccaccaaggcagggcacagtggctcacaatctcagcatgttgagaggctgaggagggtggatcatttgaggccaggaactcgagaacagcttggccaacatggcaaaaccccatctgtactaaaaatacaaaaattagccaggcatggcgatgcgcacctgtaatcccagctactcaggcggctgagacatgagaattccttgaacccgggaggcagaggttgcagtgagccgagattgtgacactgcactccagcctgggtgatagaaggagaccctgtctcaaaaaataaaagtaataaaataaaaaagattggctccacgagtatgagaacgggaggtgtttggttcaccttagtgtgccctgatgagacagcatctgcagtgtcaagtgtacttctgagcccacatgataaaagggacattgataaactaatgaatccagcaattaccattcgggatggagagaaacgtcaaccacattcagtgaggatcggtggagaagcacacttcctccttcattttaaaacttcattatgaaagtattgagatacatatattatagtaacaaaatttgggggaaaaacagataagcaaaagagaaagaaaaggaatcagaaatcataatctctagggagaatccttctgcacattggtctgagcagtgatttttggatataataccaaaagcacagacaacataagcaaaaatagacaagcaggactgcaccacactaaaaagcttgtatgcaacaaaggaaagaatcagtacagtgaaaaggcagcctacagagtgggagaatatatgcgtgaactttgtatctatctagtgaggagttactatctaaaacatatcagaaacacaaatctgtaaaaaaatacaaatcacccaattaaaaaatgggctacattgctgaacagacatttctcaaaagaaagacacacaaatggtcaacaggtgtatgaaaaggcactcggcatcactaatcatcagggaaatgcaaattaaaaccacggtgaaatatcgcctcgtgcctcttaggatggctattatcaaacagagaaaagataacaggtgttggcaaggatgtggggaaaaagggagcccttgtacatccctggtgggaatgaaaattggcacagctgctatgaaaaatagaatggagatttctcaaaaaataaaaaacagaattaccataagatccaataatgccacttctgggtatatgtagaatggaaaagatatcagtaactggaagagatatcttcactcttatgtttattatggcattattcacaatagccaagatatggaaacaacctaaaagtctgtcaacagatgaatggataaaggaaatgtgacacacacacacacacacacacacacacacacacacatataatggaatattattcagccttaaaaatggaaaacctgagccgagtgcagtggctcctgcctctaatcccagcactttggagggctgaaccaagtggatcacctgaggttaggagttcaaaaccagcctggccatatggtgaaaccccatcgctactaaaaatacaaaaatgagccgcccgtggtggcacacgcctgtagtcctagctactcgggaggctgaggtgggagaattgcttgaacctgggaggcagagcttgcagtgagccaagatcgtgccactgtactccagcctgggtgacagaatgagactccttctaaaaaaaaaaaaaaaaaaggaaaacctgctatttgtgacaatgtggacaaacttggtggaaattaggctaagtgaaataaacaaggcacagaaagacaaatactgcattatctcacttatatgtggagtaccaaatggtcagcctcatagaggcagggggtagaatggtatctgccgtgagttgtgggggttggggaaaacggaaagacattggtcaaagggcacagttagggaagatgaatgagttatttgggtctaatgtagcccatggtaactgtagttaacaatattgtatacttgaaatttttgaagagtatagatcttaagtgttatcaacacatacacacacacgcacacacaatggtaaatatgtgagatgatgtgtatattaactagcttgattgtggtaatcatcttacagtgtatatatattttgtgaaatatatatatagtgatatatatcaaaagtcaagttttacaagttaaatacatacaatttctatttgtcaattttatttcaataaaactgaaaattagaaataaattgagaaacaaaaaaataaataaatcacaatctcggcctggcatggtggctcacgcctgtaatcccagcactttgggaggctaaggcaggcggatcacgaggtcaggagatcgagaccatcctggctaacacggtgaaaccccgtctctattaaaaatacaaaaaattagctgggcatggtggtgggcacctgtagtcccagctacttgggaggctgaggcaggagaatggtgtgaacccgggaggtggagcttgcagtgagccaagatcgcaccactgcactccagcctgggagacagtgtgaggctccatcagaaaaaaaaaaaaaaagaaaaatcacaatcttaacagccagaggtgcatgtcatttcaaatttttccatcttgcattatatgagaagttgtttataaaatgtagatcatacaatctcaatctgtagctttaaattagcaacacatattgttattacaggtaacaatacgtatgttgaatatgcatacctaccatgtccatataaagcatgtacaaaattatttctaatggctacataccattcttcctgccctgcggtttacaaatgagcagaggccgattctgattttgatgttcataaacaatgctgatataacaataactgaaaaaactaaggaagcattctctatgctttatcttttaatcctactaaccctagaaaggagatattgttaatttctccattttatggctgaggaaaatggacttagagaatctaagtaactaacaagctgtgacattccgggcaaggatcagagctggaatttaaacccaggtctgtctgatgcttcagccaagattggtaattaccacaatctactgctgtctacacacatctattgtattttttcctgattacttcttcaggataaattcctgaaactatacttgctgggacaaaggagatcagaattttaaatctgggaaacagaaaagatggttgtgatgttcagagacgtgcaggctgatgacatggctgaagatttggttccttccggctcacttaccggcccgactggaaccgagaggtagaccatgggtcacatgtgctccaaaacggaacaacctgccaggtgaggtggctcacgcctgtaatcccagcactttgggaggccaagccaggaggttcacctgaggtcaggagttggagaccagcctggccagcatggcgaaaccccctctctactaaaaatacaacaagtagctgggtgtgatggtgggcacctgtaatcccagctactcaggaggctgaggcacaagaattgcttgaactcaggaggcgcacgttgcagtaagttgagattacaccactgcactacagcctggggcaacagagtgagacctggtctcaaaaaaaacaaaacccaaaatgttcacaaggaacagccttccttgtgagtcagagaacatcccctccccaaaagcattccagccaagtatgcaggggaccctggcagagatgtcagcaccaggaaggagactgaagacccagtgccctctccaattctccggttctttcagaccgcagcccatccggccgtctggtgctataattatgacataaaatttggggagtctttatttatatgccatacttactaaatcagtgtttcaaaactatttctataaaagaaaagtcatctttgatctctaaaaatgtaggggggtaggtggtggaggaggaaggcatgaacccatataaggaaatacattcaactggagcaaaatgcaaaaacggcctctgtttcggattaggagcctttgttccctggcaatggctgtcctccaccttgccggagtcttctgtccaggcttgttttatttgtgagagccagagccacatgttattataacttaaaatgcatatccacctcaagaaagctgtgacgtatctaccgaaagagacacagactgcctagcctaagttggcctttttttccccttcttagcctaagttggccttttcttcccttctattctaatagaccttgttctttttttttttctttttgtcactcaaaatgagtgtctgatgtactagcataaattgttaaaagcagttttaggtaaaggaagagagagtaaagtggagattttttcacaaaagccaacctcaatttatgtcaaagagggttaaaagaccttgggattaaagcaataaacttgctgctgtcaaagctaaaacccgctaacaatttagtgccaaacgcatgttgttcaatatcatttcatattatattatgtcacaaagagctgatggttctgcatcaccctgacaaggctgatttactctgaagaattcatcgacattttgcacagtcaaactgacttcattttgtttggatggacggtgggaaatgtctctgtactcgagttcgaatattagtctgaaaatctattgtggattaaagattcaggaggactgttggtctacagctttgccaagtaaggtctttgaaaggtagctatagacttttgaatgccttcattggcgaagtgcttagaccaaagactaataaaaatcaacagacgttaagttagatttttgcggcaccccttaaagtatgtgaactgttagccaactctccggaaaaagaaagttgtaggagcagattttccccagactagatatcaattatttataaatttctcaaaagatattaatcaccctattttcttaattatgtgcacccataattcccttttcccattttattttttactggaacaaactcatagttgtaattgtggacattaagatgtcttgtcgttcaaaggtgatggggcagtgggtatgtaggacttcaagtcagggagacaagattttttcctgggacgattacagaaggaatagtggctctgaaattatatgacctctgccttgaagagctagatacaaatgaggtcattttttaaaatcaaatgattgaatatactatacacagtaaaataatatttacataaatgtggatcatttatgaaatatgtatctatatttatatacttaagtctgaaagatgattcaacaaaatattgagtggttatttctgggagatgatattagaggcaaaagttgatttttttttcttttcaacctacagatattttcaaattttcttttattaaaaaaagaaaaaagatataaaattatactgaaggaattgattgtccaaagctattccacagtgaatgtctttgtaaagtgtgatccaatggtttaaatcagaagaaagaaattcctaatctaaaagggttctacaattgttgttttcaaacattgctttcttcagaatgtggcccttccatggtcagccctctgccctgcaggaaggaaaatgagtaagatgttgttgcttctacatcgagtggctgggattctaagcccaatatcctcagggcgctgtgtgcattccactgaagatgtgattgacaagctaggaggaggccagcctccaccacccaaagggtgctgaaaggcctagacggggttccaaacaactccaggtggcaggatcaagtgactccagaaaaggaaactctgtgtgtgtgtgtgtgtgtgtatgtgatttgatttcttctacaaggatgaaggagatgcttctcagacttgcctgacttctctctccagggcctcaaaggcaccatccaccttcactttctgatgggcccccagtgccacctacacctcacctgagcctcatacagcttcccctacaggccaaggggacacattgccaaggctgccttttttttttttttgaggtaagtctcactttgtcacctaggctggagtgcagcggcaccatctccgctcactgcaacctccacctcctgggttcaaacgattctcctgcctcagcctcccgagtagctgagattacagtcatgcaccaccatgcccagctaatttttgtatttttagtagagacagggtttcaccatgttggccaggctggtctcaaactcctgacctcagttgatctgcccacctcggcctcccaaagtgctgggattacaggtgtgagtcactgcacctggccccaaggctaccttctaacagaggatgttcacttcctaaaacattaagtcaataagaaagtgccatgcgtacagaacaccacgacacctctgcctaacacagtgtgtggcctcagtttccttctcagtgtgattggcactaacacacgtgtcaggtctgtcctgcagggttaatgtggaacccagctgcataaggcatagccaatgaactgaatagacaccttccagtgcctaggtagcagtttgggggtggcacagtggggtgagacgttaccgcacaccccaggtgctccctatctagggatgaactgaaaccaaggcccagatgtggtaagggccaaaagaagggcagagtaagtgtgctgcacacccagtacttttctcagggcacaggaggggtgttggtggaggaagtcgcagtggagctgtgttttggaggacaagaaggcaattgcctaaggaacactttgagatacaagacagttatggttaggagacaattcccaatagtaacccctaatgagataagagtgagtggagagcttggctttcctgtttatttctcatgcagcccttgcagaaggcagaataatcaacccatgtggatgcagacattccccttaagccatccccagccctccctctccctccttttgtcccaagacagacaacccctaaagcatgagctcatccccttttgcacactggatcctgttccttggactgtgctcctgttctaggttcctctgtccccaaagagcttctaaccatggccatgcctctgccacccttggcttctcatcccgacatccaggaattgtcctgcccactttggaccagccctgcttctggcaagcacctgaggctctcagcggcccactgggcagagacctgggcgaggacagtgccactgagggccaggaagttttgtaggatatacacccagtcatcctcactgaccaatcactcttgcctggctctctggtaacacagagctcccagaccagaaacttccctccaggagtaactgcgctggtatggaaagtggaaaagcaatagcaacaattctataacccagagcacaatgggctgatgacaagggctggaacgcacacaagagagtgtcagggtcagggtcggaggaaggtactcagatgaggagacacctggcctgtgtctccaacagggacacataaccccaagtttggccgggcgtggtggctcacacctgtaatcaatcccagtactttgggaggccaaggtgggcggatcacctgaggtcaggagttcgagaccagcctggccaacatggtgaaaccctgtctctactaaaaacacaaaaaattagctaggcgtggtggcgggcacctctaatcccagctactcaggaggctgaggcaggagaatttcttgaacccaagaggcggaggttgcagtgagctgagatcgtgccattgcactccagcctggatgacaagagtgaaactccatctcaaaaaaacaaacaaacaaacaacaacaaacccgagttcaaggggaaagcaatggaggaactgtagagaaacttgatgggatgagggtgttgggaggacaggagttggaactgaaaatatagggttggggcccatatagcttaatattttctaagaagtcttaaccttatcttctagggaccccgagttgcagaggggatttagacagagataaggatacggttagtttgttgtgttgaaaagttgcatctcattgtagttttgcttttcattttcctaacaaggattggtgttaagcaccttttcctggccttcactcgcatttttgtatcttctttggaggaacatctctgcagatcctttgcccatttttaaatattgtgatttatctttgtattgtagagttgacatggttctttatatattttgtgtaatagtctcttatcaaatatatgattacaaatattctattcatctatcatctgaactattgaagcctcctcctgtaggcctccttcctccttttcttgctcccctacaatctagtagccagagagatttttttaacataaatcataacataaacatagccctagttctccatgcaatatgattttttcaaaatgtttcttcgaccgagtcactctcctgcttcaaaaaatagatttaagaaaataaaccccttttcttgcttcccactgctgttgggatgatgtccaggacccttcccttggactctaaaggccctaaatgatttgttcttttttgcaacgccacttcaattctcaccactctgcaccatcgccatcccccagcacagtgatttgatttcagatccccaagcttccctgcatcccatcctctttgcattccagaagactctctcacccctcttccctggccaatttcctttcacctgtatcaggttaaatgctgcttctcttgggagaacatcactgaccctttcaacctaaatcaagtcccctttagacaaggacagtgctcatcaaactcatcacactttgattggaggaattattgattgatggtccttagactaaaagtgggagaaggacggggcccatctgctctgtgtctgtagaggaaagtgccagaatgaaggtccccttcggccaccaggggcccaatggagaagctgtgtccacaaggtctctctctgagactgccgtcttcccaggtgaaggcgtacccgataaagctcttatcaaaagagcattcactatatttctgtcccactctgtataggctgctcactctttctcccaacagatttggaaatcacaaaatttatgaaatttcacccaagtctttgctgacttttggtgctgaagaaagtgccatcaaaatcacccccacaattcattagtaattcatcagccttttctccctcaccctaagggacaaagaaccatgtttcttagagcttgggagagccccactgcctttgttgtttgtgtctgtgtgttttaagttttattttaagaatgattttctaagaggcctttgaagtataaagctgccgcctttgctaaacctaatgttcttgtaaattttcaccttggatctgacagtgaatcagagacagagctggaaagggcttcagtgaaggcagtgattgggaaataggtccagagggtgggcaccttgtttttgctgccttttcacaggtcacttggaaggagtactctagttgtctctttttgcttttagaaacttcccttcccaacattcttggctgccccaaacagccatgccctctgatggctcagaggtggatcatgtgacctatacttaagccaaccagcccttcatgtccattagtcctcggtgattagtttggaattagacatttgacccaagtacagccaccaatcacatgcaaacaggttgtgggaatgctgggtgagaagctctcattttcccctaagctgtaggtgagggtgggtgcagatgccagagctgctgcaactatcctatgaatagagtgcagagatggttagggcttggtctgagaaccctgccccagtcctaatgcaggggggcctagaggcagcatccctgctgccattattagttatgcaaggtggtgaatttcttttttgttgttgttgttgttttatttttgttttgagatggagtctcactgtctcacaggctggagtgcagtagtgccatcttggctcactgcaacctccgcctcctggattcaatcgattctcctgcttcagcctcttgagtagatgggattacaggtgcctgccatgcctggctaatttttgtatttttagcacagatggggtttcactatgttggccaggctggtctcgaactcctgaactcaagtgatccacccacctcggcctcccaaagtgctgggattacaggcgtgagccaccgtgcccggccgtgaatttctttatcctaggttctggccactttcacagacagtgtccttttaacgcactctaccccgtgtttctatgcctgctctccggatggaactcggctgccattcgtccatgcagctgtgtgcacgtgaagggccctctaccaggacggcacggtcctcaggcctgagtatcctgcggcctgctgtggtctcactgaccctcctcacccaggacaacctccagctccctgtagccacctgtctctctcaactgggcagctcttgcattttgagtgggttgagtcatcctcctgtggagctttcacaggtgctgcgaggagccaagtagtctacctgtctggccccaccactgtgacaaccttcacacacatgtttgatgggaccatggcatttagagcctgcatccaccttctcacccttatcttccagcgtcctgccttccttcacaggacagaaggagagttggcagccccaggctcactctatcccatggccgtccctcctgaggcttcacttctgcaaggtaggagcctggagatgctgccctagccaggtaaaaggaagacagagacactcatctacatgttatcatagtcccttccccgaggctgggaaaggaggattttattctccaggcaacgtccactggcaacgctgcccaggcagctggtccctagccccactggaggcattccaaccacttaacacagtttttcaatttccactgtttttgcacatacatttccatccctgggatggattgccacggggctttcctctccaaaattctgatggatggcatttttaccctgcaatgatccctaagttaaagtgatattcaccaatatttattacgtggtaatggcatggagcaccagatcaaaaattcatggcaagcacacactgcaacactctccctgaatgctctcagagcagatatatgattctatggatatgcacatctgtatgtaagtagtgtacgcatgcgtgtgcactcatatacacacacacacagcctgggccacatcttgtctttcaactccggtggcactacagtaacaaaccggtctagaagcaggcctgagagacaggatttctcaaccaagagatgggcagatgtgagtttaaaggaagagccagtagcaggaggttcagtttctcccactctaccaccagctgggagttaattcatcagttctgggactcattcaaacagcatggcatgacactggtggaaagcaaacacatcctctgaatgcctgctgtattctgcagaggagagcagggagctgagcctggtatccggagctcaaggcctgatagcccggactcacatgaaggccagaggatgagctcccagaactccacgagtcttggcctaatgtcttttagccaagagcatttggtgaaacaaaaaagaccctttgaggccaagcgtggtggctcatgtctgtaatcccagcactttgggggggccaaggcaggggatcgctcgaggcagggagttcaaaaccagcctgggaaacatggcaagatcctgtctctaccaataatttaaaaattagcctggtgtggtggcatgtgcctgtggttccagctactcaggcaactgggatgggaagataagatcacttaagcccaagcattcaagcctgcaatgagctatgattttgccactgcactccagcctgggcgataaagaaaggccctgtctctaaataagaataataagacccttcacaagcctcaacaaagatagatccaagatcctggctcctcactccacaggtagccagagaagaccctgccatctcctgagcctaccctaacctctcccactaggtttgatcctctctcctttgtgtcctgacccacatgactgcctgcacccatccccaccttggtaacattccccaggaaatcattttagtgcctctttcctgcccttatgcctctaatctattttgattttctgttactgtgcctaggaatgccaatgcattgttgaacagaaggggctaggcatcagggacagcatcccacctctctggccatcttttagccattaaaatttgccatcacctattgttgacctgccgccgagctccatggaaagaacacaagatacgtattgcaatggtgtgaaaacatttggctccaattttttctatatatatataaatttttttctcccttttcttcctccttttgacccacagaaaagagaaccctaagtccccacactctgtcacttcataaatctctctctaattgcacccttggggtctctcttggccagtctttcagaagaagggctacctggccttccaaggattggtttatcaccttagttgctttttgccaggttttctccatcacaagagtcttttctttaatgacctgagctatttacaataaggaaataacgtggtcataatcagagctggggtgattttgctttatacaagcctctctctctctctctctctctctctctctctctatatatatatatatatatatatatacacacacatatacacacacacacacacacatatgtatatacacacacatatatgtatatatgtatatatgtgtgtatatatgcatatatatgtatatatggtgtgtgtatatatgtatgttgtgtgtgtgtgtgtgtgtatgtataaaaggcatctatctgcccttctccacctcctgaaatattcctcaactgagatttccatcaaacccaccaatgacctaggagtatctaggtgggtctccttgcactgttgaccatggtgagttcacttggaaagccctgctctagggacaatgtgcatcctattctgtgcccccagcatgcatatgcccaaatcccccaagaatagaagaaagacaatgcattgctatttccgtctccaaaattaccgtggatggcattgataagtctgaaggagggagaaaaggaagaatagaaggatagggcgttagcgagagggcaaggagaacaaaggaaggcattgttggacaataagcagcaggtgaacaggaacactttgtccagagggcctccacagtggggagggagcaggtaggaagacagcggtacttagaatcttagccagagttcaaattatagggcactgtttcattccccaaatcaggtatttagaaacacagatagagggaatccctttccaggcttccattgtctcccataaaagcatgctggatgggcatagagagaaaaaatgaagcagaaactcacaaaattagactcaacatgaatttgatggggtgtagaaacgtcctgcaatcagaggagacatgctcccacctttaaacatgagagggctgggctggcgttgctgcctcaaatataggatgaacttgaacttcagataagcaatgaacaattttttataagtataaagtatgtccaaatatttcatggggcacacatataacaaaaagtattggttgtttatctaaaattccattttaatctggcttttttttttccttttgctaaatcttgccagatttagatcaggcaaaatttccaaagcttctttcagtttttccattctctgttgtgtgtccccaccccaaggggagagccactggggcctcagaagaggcaggggacacaagaagataagaagagttctaggatcagggcagcaaattacggctgaggctacacgcatagggaaggggttgttgaaacaggcaaaaccaagtgtgccaagatttgctttaaaaagaaaaaaaaaaaaaccacaatggctcacacaatggctcatcagcagtgcggctgacccagtgagtccagacaccacaacctacggcaaaatctgaactgtggaactgtcacggagcaactgggaaaacatgaattcatagttaaaccgataaaattctgtgtaatctgtctttgtaaccccagaaactgaaacttatgcttaaaaaaagactaatattctttttttttttttttgtctaaaccactaattattttacctggaggaaattcctctattattttcactgctggaaaatcacagggtggttagtactgctagtacctgtcacagacagacgtaaacaatgcgatccaataaaaccttatatagcacattgcacacaatagtggcttgccagactcacccagtaaaacaaaacatcaaagcagaaaaaattaaccaaaaatagcttgcacggggaaacgtggtaagcgagtttgaagactgaattcctaatatccctggacaacagacttcactgatacgagatagtggaaggaaagggtcccggggaggggctgacaatgagctgtcaagatctgaccgcaactcgcttctcctctgcacctgggttcatagcatagtcaggccactaatagtcctgcatgtcggttagcacttacagtttgcaaattgtttttacatgcactggctcattgggtcttcccccaatgctgtacaatcagataaaatcctgccattctccaggaactgactcaaccaaaaatgctcaccacaaaaatgctcagcctagttggggaggtacccatttatcaaattgccgtactaatgaaaatccaattatagacagagataaattaaaggacttggatctgactttgcgcagggtgataggggaggctccctggaaaaggtgatgttagacctgagctcaaaggcaaataggatgggggaagcagcaacttccagtgaaagggcagagtcctgagcagggaaagcctgaaggtatgcagagagagtgaaataggcaactgtgggggtggaggtgggcagaggaagagaggagaagagaggggcaaggcagagaaggaggatgagcaggtgccagaccatccagggccccagaggccattcccagggtttgggaagccacggaagggtgtttagcaaggaggtgagagtttcggatctcctttgcagtgtgccttctccacttcacagctatgatccagggtccggagccctgccttccttctaggaatttataagtttcctaaattatcaagagaaagtttggggctgggtgcagtggctcgtgcgtgtaatcccagcactttgggaggccgaggcgggcggagcacctgaggtcacgagtttgagacaaacctggcccacatggcaaaaccctgtctctattaaaaatacaaaaatcagctgggcatggcagcgggcgcctgtaatcccagctacttgggaggctgaggcaggaaaatcacttgaacccgggaggcagaggttgcagtgagccaagattgcaccactgcacttcagtctgggcaacagagaaagactgtctcaaaaaaaaaaaaaaaaaaaaaaagagagtttgataacaaagagtgagtcagatgtcacttaacagagcctcatttggaatttggaagtgcacccctcctatgagtggccaacgggcaaagctaactgcagtggaagaaaagtccttagtggatgccaacttcttgaatctagtgggaagacaatcaatgtttctcctcaggatggcacagctttgacctttgctcaggtggacactagagggcctcttggtcattagttatgggtgagaatcatgccggaggaggttaggctgcctctgcccttcattcttggtttcctggaggtctggtgtcattgttgcaagccccatccacctttctttctcttgttacactcattcatctctgtacatctcctctatcttaagaattctttcaagtttggaaagtgagaaacttttctttatttataagcattcttccaaatgcctaagttcatctttctgaggcctaattttggattatccatagctagaactaactttctttctttcttttttctttttctttctttctttctcttccctccttccctctttcctttctttttctttcttccttccttccttctttccttccttccttcattccttccttcgtttgtttgtttctttctttctctctctctctttctctttctttcttcttcttcttctttttttttttttttttttgagacaggatccagctctgttgcccaggctggagtgcagcagtgtgataatagctcactcactgaagcctcaaactcctggactcaagcgatccttctccctcggcctcccaaagtgctgggactacaggcatgcatcactatgcccagctaattttaaatttttttttgtagagacaaggtcacattctgttgcccatgctggtcttgaactctgagctcatacaatcctcccacctcagtcttccaaagtgctgttattacaggtgtgagtcaccacatccagccaaatgttttcttttttctttgtactctgctagtatcattctttttctgaggcatcgaatataaaatgcccacttgactaaatgggcaaagggcagggcttagcaggaaataactttattccaacacaaagaggttttccatttgcaaagatcacgctggaggcatcaaagagaatggtggcatgacggtaaatcaactggtaattactgaatagctctggtggaaagagatggtaacttggactgggatgattgtgttgtacatggaaagaagaaatcagattccatacagattatgaaataagatattgagactaagccatattttggagatagtgaccatgaagagagaggaggacctaacaattctgtttgacatttggatgaggcagggttgtcttcactggaaatggaaaactagagatgagagttacttttgagaataacgaccaccagtttgattttgaacacactgagattgagacgactttgaattatttaagaaaagatggaaactagccagagatattgatccagtgctctgcaaagaggcatctactgcagataaaaatatggaagttatagatatatgcatggtaggaggaataagttcaagcaatctatcgtatagcatggtgaatctagcaattaacaatgtgttgtatatttgaaaattcctaagacagtagattttcagtgttcttaccacaacaaataataagtatgtgaagaaatgcataccttaattagcttgacttagccatcctgtaatatatatgtattttaaaaaatcatgctgtatgctacaaatatataagattttaatttaccaattaaaataaataattatggccagccatagtggctcacacctttaatcccagcactttgggaggctgaggcaggcggatcacgaggtcaagagatcgagagcatcttggccaacatggtgaaaccccgtctccactaaaaatacaaaaattagctgggtgtggtggcgcaatgcctgtagtcccagctactcaggaggctgaggccgaagaagtgctcgatccttgtaggaggttgcagtgagccgagatcgcgcctctgcactccagcctggtgacagagcaagactctgtctcaaaataataaaataaaataaaataattataataaatacaattaaaaacggaaaataatggtaagaaaaacaataaaggagattacccaaggaaaattaaaaggggtagggccatacctcagacagatctcttatttaatggttgaatcaatgagtctgcagaagactgaaaggggatgctaggatggtaggaagagaaccaagggagtgagtcatgacagaatctaagggaacagatggttccagtgaagaagcaggcgtcatcagtgccctgagctgctaaggggcaagagggtaaagaatttaacacttgttggatttagggcatgaagggtattggtgaactaatgtctctcttggtggagggatgtgggaggaagctaattgcatgaatgtcatcgcaaatgggaggtgaggaagcaggaacaagagaacacagacagtgcaggttattctcactgtggcagacaccattcttgccaccagcttggctgtggcagggagagaacagcagggcagcagcaggagggagatgtggcatccagggaggtgtgcttattggcttgcttgcctatttgtttgaagacaggaattttgaggatgttcgtggtaagcagaaaggcccctgcagggggaagagtacttgtgtggataaaaaggggaagggacattttatagatcatgttgggtttttgttaagttaggaggggtgggacctaaagcttaggtggtgaccatggggaagagaattcaccccagagaaggtgaggagcatcctccatcccatagttgagtagggaggaggacgcagatctgcacaggtggaggaggcttggggcatggcaccaggaagctttgtctaagataatcacggtaatgtaagaggacatgtcgtgtgctgagtggtggcagtcaaacatttgaaaggaagagatacatttcagaataagtctataagcaagaaagcaaattaatttggtaagtgcagcagaagagcctcgcaggtttgagagatcttctagggttggtgactatggatttaggatagaaatggaggagcttgtggtccaggagtgggatgttgaattggcctctgtctgtttgcccaaagcatttgtacattcctgacccatgtaaactttatcagtctaaataagatgatactcttggaaatggttacatgtagttcaccctatttccccaactagtatgcacactctttgaaaacctaacttctctgccacttgtcccacccatcttcaactatcttcctacagtttcaggcaaagactacatcgtagcatttttgtaaataaggtaaagtttgtgaaagcattacaaaaacttggcagtgggcaagataaaactgagtacttaaattattactgcatcaatccggaagcctaatatggatgatattaacaacttactttttgagagttttaattatttttcagattgcaaattccattctcacacagtattttatttgttccgaaaatcactaatgaggtgggtatttttttattttatttttatggaagctcactctgtcatccaggctatagtgcagtggcaggatcccgtctcactgcaacctccacctccttggttcaagcaattctcctgcctcagccccccaaatagctgggaccacaggcccatgcctccacacccagctaatttttgtatttttagtggagatggggtttcaccatgttgccaggctggtctaaaactcctggcctaaggtgatctgaggtggatatttttgaccccattttcagtccaggagcctgggtggctagttgaaggtcagagaataaagatgtgtcaaaactgaaggtgcaatccaggtcttgggacatcaaggaggaagctggtttcatcagtgcccagagatgccaaaacgtgagaatattcaatacggattaatgatcctcaaagctgacaatggaagatgaatctatagactctttttctttgtggataccaagcatagttttcaaatatccaggccaactgtcactacactacactacacctggccacacctccaagactgagagatgcaaagaccgtagaaaagagtcatcagcagtttcctcacctcctgcaagaactgctgtggattgtatttgtggaaagttgtttcttcatctaatgctttgggacaacggtgatagaataatagccctgcctgggggaaaggacattttcctggatgtgtagatgccggacccccagggtcgatgcctggccactgtctatgaatctaaagctaatctcagagagcttgaggctggtcagagaaacccagtaaaggcatcatttttccatgagctttacgctaaatgaattgtccacataagactccccttacatctcccatgtgcattaattttttgccaatattaacaaagaaatgtccaaacaaaatgccaacgacttgacaggtctatttttcagagataaattggaagaaggtatccacttagaaattgggacattgatattgaaaggggaatgtggatcttgtttatcttcaaaagaattctttaaaaaaaaaacattgcaaatccagtaatccacatcacactttagaagatgtccttgagtctcagagggaaattagttgtatgcattctaagctaggatatggctgggtttattccatttcttaaatgtctaaaaaatatcaggaggatctattaagctaaaggacccatgttaatgcaacattagggaacttgattacagcccaacactcaggaaaatcattttcagcttcgcacatgctacattgcacatgtaatattttctgtttgatgttatttgtcatttattaaatgtatatattaatatgaagtgttccatttcctggctatggggtgtttaaaaagttcaatctcacttcacactcacaccgaagaaatctcatttccctacccctttcctgagccaagattcctctgccttgctcaggaaatagaatgctcattctgtttattgagtgcttagtgtgctctgggcattaggctatgaaatacgtcaggaagaccataagcataactgaatagtacacagcctctgcccttccgaggcttacattcagtggggagaaggagacacatagacacataaatacagcagctgtcgtatttaactgattaaatacaacatgccaaatacaataatgtaggcataccaaatgcatcaaggaataccaagaaaaaatgtattcactctggtggggggttggagaagacttaggcactagacagcatctaagctgggcatatggagtagtcattctggttttgctagaaagagaaaaatataaaaaactattgtgaacatttttttttaagtgacagattgtcaaagtgagtttcttatggatttgaggtctcttgaggagtcaactagatacacatcaaaacaccaaggtgtctgggggactaactacactgtatgaaaaataggcaatggctataaagtaaaatctgctccacaactcctgatactgtctttggagaatgactaaaaggtctaaagagaagagagtgaaaagattcataacaaggtttcgttctgaaatagttattaacctagagtgaacccccttacacccatccccctgagtcaccttcacccaagagtacacagtgaagtcaggacctcagggcactttcaccaaggatatggaaaggctacccaatgaataaagttttttgtttgtttgtttgtttgtttgttttgagacagagtctcgctctgtctccccaggctggagtgcagtggcgtgatctcagctcactgcaagctccacctccggggttcacgccattctcctgcctcagcctcctgggtagctgggactacagatgcccaccaccacggccggctaatttttgtatttttagtagagacggggtttccccgtgttagccaggatggtctcgatctcctgacctcgtgatccgcccgcctcagcctctgaaagtgctgggattacaggcgtgagccaccacacctggcccctcaatgaataaagtttaaggagatggtagttaacaaaaaataaagtttccttttgattaggtcacaactcatgcttacttaacataccaatgacatcaaaccatgtaaaacttgtattgacatttaaaaacatggcataatataccatgctaaggtttaactattttcctgtagtgttcattattcatctatccaggcttttctttctacttataaacaatgtttccataaacatatttggttacatctccttgtgatgatttctactgctttgctatgataaatcctggaaatgtaatcgcagggaaaagttttcttttccaaattggctgactcctttgaaatatttaaatagtctttttttttctattagatggcttgaattttctcattgatttataagcattttcatgtatttttgacagttgttctcgtcacatttgaggcaaatattttctcctagtgtcacctttagattaagatgtttcctacctacatactgtgttttttaaaactttggcaacttcaaatttatccatcttttgttttctacttttaaaaataattattaaaataagactctataattcttttgatatgcttaaagttttattttgtgtgtttgtgtgtgtgtgtttaggcacttcatatgtcttaaattcattatgtaaattttgtaaattagatatctaacatatcagactccccatttttaaacacccctttcaatctccacagtgatggttaatattgagtgtcaagttgattggattgaaggatgcaaagtatcgttcctgtgtgtgtccttgagggtgttgccaaaggaaattaacatttgagtcagtggactgggagaagtacatccaccctcaatctgggtgcacaccatctaatctgctgccagtgccgctagggtaaaagcagctggagggacgtggaaggacttgactggctgagtcttctggcctccatctttctccgtgctggatgcttcctgccctcgaacatcggactccaagttcttcaacttttggactcttggattcacaccagaggtttgccaggggatctcgggccttcagccatagactgatggctgcactgtcggcttccctacttttgaggttttgggactcggactggcttccttgctgctcagcttgcagacagcctattgtgggacttcactctgtgattgtgtgagtcaatttcctaataaactcccctttatatattcatctatcctattaatcctgtccctctggagaaccctgactaatgcatccactaatttcaaatatcagtgtatctcatgataacttcaatatacaggagtgtctatttctgaaattttgagtctatttcatctatttgtatattcttaagtaacaccacacttctttaatgtttaaagtttcataaatatgatatcagatggtgaaagtccatccctttgatcacttttttcaaactttcatgtctgttaatgagcagttatcttccacttacatttcagaatttatttgttgatttgcataataatatcattgtcattttgtttggggttacattaaattttcagataattttggagagaggcaacattttaaaaatagaaactcccatccaaaaatagtaagtaaccctccatttatattcaagtcaatttattaaaatgttagatgtttctataaaggtttattatattatcattaaatttgtttactcccagctacaatattttatagattttttttattgctgtttggaacaaaatgtgttgtacttggttactgctggtacacagggaagttttttactttttcatattgatcttatatccagccactcacttgaaatcttatatcaatattactggattgttaattatctcaattgttaatagattgaattatttaacatagttaattatattatcttcaagtagagacagttttgtctgtttccaactttgtttcctcccttttctcccttgctaattggctaatacatctagtaaaatgttgaatggtagcaagcatttttatatttcctaactttaatgacatcacttaggttttaccaatattttgtatatttgctgtactttttatcatattttttctatcctaagtttattattttatcacaatatggtggtagtttttttttaatgctttcagacacctattatgatgataaattaatggttttactactttgctttgctaatatatatagtaaattacattaatatatcttgtaatgtagaaatagccaaatttatacctccagccctaaattttcccttggactctaaacattgtataactaactgcttctatacaactcagatgaacaatacacttcttatacataatatagcccaaaagcaaacatttgattttttacccaaacccctttctcccttagtgattccaatcttagtcaatggcaacatgacctactccgctgctcagggaaaatcactggaagcatccttggccctcattctctgtaatcggtcatattgaatccattagtaagccttgttgtcaccacattcaaaatttatctggaattgcagcctttcatcttccatccctctagcccaaatcaccagcgattcttacctggttggcttcagtaatgtccagctggtctctatgtttccatatttgttctgtttattccattctcaaaccagcagccacagggatcctcctcctgtcagctgctgaaacattcactctcttcccaccacatttaaaataaaatctaaaattgcttccagggccaagaaggcacaacaccatctaggagctgacacttcctgacattatctcttatcacttttttcctagctcactgacttcaactacgttactcacattatgattccttggtgacaccaagcacattctcattgtagggcctttgcagttgccgttactctgcatggaagactccttccacagatactcaacacaactcttctctttacttcacttctctgctgaaaaatcattctatcagaaatatcattctatcagtcttccttgaccctgcagtcccagctggcccatagtcctcattttctatttctttgttctgcttttgttttcatccctgactttattttatgtattttaatcttgttcattgcttgtggctcccattatattaaaaattccataagggaattatgtgtttaatttactcactactctattctcaccgactagaaaaattaaaatgtatccagactttgtgaaatgcccagtgggcaggaagcaaaccacccccatttaagaagcattgcattgaatgcttattttaaaaataaaagaacaaatgagtcaaatcagcaatcttatcttctgatggaaaagaactagaaaagaagagtaagttaaacccaaagcaagaaggaagaacataataaaaatcagagtagagtgacgaataaggaaacacagagagagagagaagatagaaaaaaaacaataaaaccaaaagctagttctttaaaaaataaaacaacaaaatgtataaacctctagctaaagtgaccaagaaaaagaagatataaatgaccaaaactgggagtaaaagcaagaacatcgctagagactcaaaaataaagctgagtggctatgttattattattagacaaaacagacttcagaacaagaaacattaccagagataaagagggacaagacagttcataaatatgtatgtacacaataacagactttcaaaatacataaagtgacactgacaaagctgaaagagaaaaagacagatccaaaattatagtggaagattttaacactcctacatagtacttgatagatcaagtaggcagaaaatcagtaagaacatagaagaaatgaacaacactatcaactaacttgacttagttgacgtttatagaccgatcaacccaaacagcagaaagcacatacttttcatatactcagagaataataactaagatacatcatattttgagccataaaaggattgctaataaatttgagagaattggcgtcaaacagagtcagttctttaacttcaacaagattagatataaaaagcagaaaaaatatctggaaaatcagcaagtatttggaaagctgaataatgctcttctaaataacttatgggtcaaagcagaagtcacagggaaaaattagaaagtatttttaacagaatgaaaacaaaattacaatatagttggccctccatatctgtgggttctgcattcatgaatttaaccgaacttggattgaaaatattaacaaataaaaattgggtttgtactgaatatttacagactttttttcttgttgttattcccaaacagtagagaaaacaaccatttacatagcatttacattgtatcaggtattataagtaatctagagattatttaaagtatactggaggatgtgcatatgttatattcaaatactatgcaatcttactttagggatttgagcatccctaagttttggtatccacaggaggtcctggaaccaaatcccatgggcactgaagaagaactgtatgtcgaaatgtgtgggatatggctaaaactagggatatggctaaaactctgcatagagaaaaaatgtacaggtttaaatgcttgtattagaaaataataaagttccgaaataaattatctaaggtctcaccttcaaaatttagaaaaagcataagttctagagatccactgtacaacatcttgtctacagttaatgacaccatattgtacatttaaaattcggctggaaagattgatcctatgttacctgttcttactacaataaaaaagaaaggtaaattaaaatccaagtaagtagaaatgaaaattaataaagacaagaccagtcaaaactcaataataaacacacaaacaataaagaaaaaaaaaataaaactaaagcttttttttttggaaaaaaaaacagtaaattgtataaggctctagctttactcattaataaaacaaaagacagagatcaacaataatgtaaatgaaagaggggaaaccacaccataccctacgaatttatgaaagagaaattactaaaactgactaaggtagaaatggaaaatctgaatagtcctatgtatcaactaaatatactgaattcattaattaaaaacctcccacaaaggaaactccaggcccagagggcttcgctggtaaatgctatcaaacatttaagaaggagaataccagctctacacaaaatgttgcagaaattagaaaaggaagaagcactaatcaatttattttataaggccaacattgtgcttacaccaaaaccaaaaatatatatattacagggatttaaaaatttttttaaagctagacattaactttctcatgatcacagatttaaaaatccatagcaaaatattagtgaattgaattcagtaatatgttaaaattagaatgcatcatgaccaattggggtttatcctgctgggaggataatttgcaggcaggccctacttcccccgtgatgggtggactgctttgttgcacaacctccctgtctctctggaccccaggcctgcaccggccaggctgccctccagccctcccatcgagtgagatctgctgcagctcctccccaccttaagcatgtccaaatcctgacaaccagattttcactctgtcttttacacaacagtgaagtttgatcaatgcttcttaatctgtggataaacagtccttaaaagttcaagagcaatcttgttcaaaaagcagcagctcacattccatgatgaatttaatcaaggtgtccttgttcccatcctgtaccaacccgcctaactcatatccatttttaactttatttctctttttaacaacatactcaatgcagggaagtcagaaaatttggacatcaaacatcaaaatcagaagaatcactcaagatcccaccaatcagaggtgaccattgatcctattttcttatgcaaatttgtaagttattttctgactttgttattctgtttggaaaggatttttctgaccctcagaaggtaaactaatttgtgtctcttatcctttaagcaatttcctgagaataatttcaccatttaataaagcacactgcatgtgtaatataataaatacttttatagattttggtatatttatgatcctattattctctttcattgatctattttttgtcattcatttttaaacaatatgatttcataatatgttctaatacattatgtgcccgatttccataaatattttttccaattttttctcattttcaactttcattcatttcacgtttatttttctagataaaaggtgtaaaacatttttacatttgccaaaaatttatttagaagattgattcaaatttcattatatttatagattgacttaaggaagaaacagatttccaattctgtattcccgtttattaaaattctgtttttattttctcagtaatatttttcttcatttcctcatagatactccatatttaaaaaatactattcaacatttctatttaataattgtgtttgttttgaaatatagtataaggcaactaaacatgctcaagaagaccctttgctggccacagtgctcagtcatctccaggcagtgcaggaaaactcttctctatggaattccagcactcaggaaccttttcccacctcctgggattccacagtctctcttgtatgttgtaccatctttttgctctttagtactgcaaagttgacctctatttcataaacttctgagcaggtatagcaagagctagaaggagacatctgtccttatcaaatgatgatgtaaaaaactgcagctactggggggtaatttttgtgttcctgacacagcagcatattttgcatgagttttctttgcattagtcctgagtgcaataaactatgatcactgtcttttgtagagaaaagaactgaggtttatggggttgacgccactggtataaggcagtctaagcaaagagcccatacgcacaaaactacacatttttgcccccttcagagtaaataatttcaagactaatgtggatttttcctgcaccatccccttccagcagggttgggagacaaatctaccataatggatgtcctcgtccaatacttcttcaatacttttcctttctgtacctctaaaggctctgatttctctgtaaacatgtagatgagaagcctatgtaactaaagactaagatgacacagatggtaacatctccctggagtcacagaggtctctaaccaccttctttattactaattcttagatgactttctaacgtattttttcttaggttgcacctacattgattgtaggttgcaatgtaggttgcaatgtaggttgcacctacattgatgcaggactctctgcatataaccattctgctatactgccttttgatgatgaggttttttttctctcccagtgttcatgcctttatttctttttcttgcctgatagcattggctgtatctcccaaataatatcaaataataatgctgatagctgtcattctttattactcttagcgctctctctctctctatatatatacacacacacatatatatatattcaatgtgttatatgtgatggtcattaataggttaagcattttttacaagtttccaaaatatctttctaacttaattcttttaatagaaataatttttaaattttattagatgtcttttggcaattgagaattttttttgctctgttctattaacatactgaaatacattaatagattacctaatattgaatcacctttgttcttttaagaagaagtttccttggccatggtagcattttgtattataagactgatttgttgctcatattctaacacttgagaattaaaatctatactcctaagtaagagattctgtggttttctttttaacttttgtctctggttttaatatcaatactttgacaactttcttaaataaattatgaagcacttaacttagggctctcctgcttattgaagttttgaatagcttgcccatgtttgaaaattgaaaaacattttagaagacagtctcctacaggtttttgtgtttattcttcattattatttttttaagcactgggtatatttaagacctattaattctttgctttcatggattagagtttgtagtgattccattacctttattttctaaattttcattagttacagatttttgggcccttttgatcagttatttctcctccaatttagaaggcatagatggagctttgctaggatatatactatttaatatctatattaatattaatgtagatattaattttcttagcaagaggtacctaccatcagacagaacaatttctagcagaaattcctcaagatttatgacatgcatctttaaactctgacagtgctttgatcattttattgagtcctgggaaagagggtcagagacgacacagcaatccccatggtttccaggactctgctgtagctttaaactcttcccagtgttgatttgacttcctaactagattgctcattcttcagttctgaatccaacactctcttcctcaaggagacatttcctgttacatcctcggaggttttgtttcttccaatatgcccttcctggcatcctggacatcttttaaaataatcttccttcccctctagagtgtaagttccatgagatccagcactaagtctgccttggttgctatcgtgtctccagggcactgcctggcacctggtctttagtaggctgtccatacatttttgtcctatgatttctagagggcagggattcttaccatcctttgtctcatttccctggatgcagagcagatgcccaataaataccacatttcagaaaaatacatgggattgattagtttttcatttttcagtgactctaactctttagaaactgagtttttctctcctctactttatgactcaacagctgaaagtgatccacagagatgattgggcctcagcctctgacagtaacatgttgatgttaattcagacacataaatatctaattttcaaaaaaaaattccaggaaaattgattttttcttagcattttttgagttctccttaattgtcacaaatatctctaagaaaaaaaaaagagttcttccttatgtctaagcttattcctgcatgttgcaatgtcaagacactggtctttgttttctccccgggtatttgtagctattcctgctgtaattacatcttggccaaagttttacttgtctgacagtgagagagacagaaagacagacagcatgttcacctttaaactcaagggaatccctcttttccctcggaaggttaggggcagatccagcaaacagaattcttagcaaaggcaaggaatcacacacagaaactgcatcacaaaattgtctcctgaagtcatatcagccttccttcagaacttgcaaaggccaagcagacaattgcctacgtggcttggaaaatttctgacagactttctttcctccaattattttttcttcacagtttaaattcaggtctcaccattttatctaaggcactgatttatagctccgaagacttctgtggtagcatccccacgtcaactgtcatgacacagtgagccacggttagtctctaatgtctgcttgcattagcaaagttctgagtgcatgatacttaagactggtaagtttggaaggagaccaggcagtcgaaaatataggtgcttagtagactctattctcaggtagcacagggtgtcttcttcaggggaatatgtgtcatcatgaagtacaaggaagtcaatttcttagaaatagaacagaggtccatgcaggatgagagaatgctcaaagttgagacagaggggcctggatgagtctgaatctgtgattgacagttgcaaagaggaattcctcttacttggaaagatgagccccttatattgggattcctgcccaactctgtattaagacggttcacaggttcatggcttaccagtccctgggggcctggtgaccacccgaagatggttaagatggttctgtcctaaagagccctgcactggctttgaaaaacagtaagatgctctctgagataccttctgatacaattattctagaatgacaatgaccagggtggcccatactagaggctctaaatggatataagaaaacatccatttctctatcagtcaccaaaacacaggcttttagtggaatcctttagagtatgtgttggccatcctttaattgcccatcaaagtatccatttccctcacgttctttcccaatatcccatcttttccactagggttcttatggttctagtgaagataaatccatcctcagctttaggcatggaacaaaggaccccagctaagacaaccaggatactccattgtcctacacagagtgattgttttaatgattggaactcaccttggctcatccaatcaggggttgtatgggaaaagaaagatgtccagggaattgtaggcagtcaagttcatctgtgaagatgagatgagaccaatctataaaaggcagaggcgagacctcagtgatgtgtttgagcctctagattaagcctgaattgagttctgcctaatctccagacattaattaactgataaattctcttccctgtgcaagccaggttgagttgggtctctcttctttgcaaccacatgtgctctaactgatgagcttctctatgatgccatggctcccgtgcaaagtcattacatgctttcttgaacatttatttcaagatttgacaaggggcttctcctctccttgcgagaaacacaagcagatagatgtctggtttgagcgctccctggcggaggcaggaaccccacctcacaccggagatttctccttttggtaggcagggaggctgaagatggaagccccagcactgggacaccaacatcatacccctccctccccctcatctggccaccagcaaccctgtcatttccctgccactgggctggctcagacaaagctgtcgttgaagagattacagacagatgctctggcaggattcaaagaccccgtggaaggaaagcagtcaggttttctcttaagcgacagccatcattttcggcaggcaggaaaattgcaggtttgcccttccccagtgcaagctatctgaaggtaaaacaatggtgagcagcatgcgcttgcctcaaggacggaggggagaggagagaaggcaacagaaggactccatctcctttaatttattttaataaagcatgggttttccaaaaggccaaagggcctcatttgccacagcatggttgggatccgccaacagcttccccaaaccgcctctttccccataattcaatcagagctgcagatggaagcactcagctggcctctccatgttcttggcccttcctgaatccctcctctcctcctctcacggcctccaccagagaggaaggctcacgcctgccaacaatcatgcctcctcatccttttcttcctccacatccctgagctcccatgagggccccacccagggccttccctggccgtcggtcctcagtcttctcagccacaaacaaggagcaggtgcatatcctaggggggaacaggcaggagggtcgccaggcaatggagcaagaccccaggtcctgctactggagacaggataaatacctggaagatgagagatctgcagaacttggattctcagcccaaagaccaccatgcatgtcctggggagagttctgagtcacagaggatcagcgggcctgtgcaacctcaggacaccgctagagtggaaagcttcccctgtgggctctcctctcactgaaactgtctgggaggagcaaggaatcagagttgaaacttcagcaggagggaagcagggacagggctgctgcctttgttctctattaatgaggaagtgaaggcaaaggactctgcctccagtgacaacagagatttctttaatcaggaccttattttctacagccccaggtagaaaaattaacccatccgttggctgtaaatgaaccaaaatcccctccccaaggtgtcccattttgtctgacttcttgctacttctgctctttaggaaaggtcgataaggtggcattcgtgtttctgggctttgaaatttggaggcaatctgtgatgaaagatgaagaaaggaaatagtctttaagaaaattccagatgtctggagcaatggctgagactagggggtggggatggtcagtactggagtggtaaacggtttcagagctcagaagtgggagttttattactggctggaaaggctggcggtggtagtcagtttgagattgttctgtattttttttccactgtcaccccaagagtgtatcatcctcaaaattaattcagtgaaactgctcactctctcctgcactcatacctcccaggctgctacatctgcctctctctgtccagggaccctggacccctccactggcctcgctaaaatgtctagctctgagcatctcagacaccagcttgtgtcccattgtcctccatatgggcaggatgtgccaccacaagccatctaaaatgaacacattctgaagaatcaaaagaagagcccaagtcggggtcaccccatagcctagtttttaaaggcatcttgctgtgaagaggtcatatcctggtgtaatgctggatagttcttttctgagaccagccaagacacatagtggatcatagcaatgaggctgcatagagaagcttcctgggagctagagacttcagacactctccattcatctaacccaagcatttctttctttgtgcttaagcacacttgtactacagagcaaattgggtccatatgcaccatttcttgtaaaccccaagtaaccacatgctgttttctggaccagtttaattgcccatgaaaccctagagttgtctgtggcatggaaggcacccaaacaatcctgtcaccatcactgtcacagaccacacccttggcacgtgggtgggcaggcatcactgctgacatgtgtggcttgctgactttgggtccaaaacagaagggccatcacaggcagctcttatctctttctatttcttaaggcaatgctgctataaatgcctggattaggagtgtgaagacctgatatagccccagttgtgagatctaaggcaagatcttcaccttctgaacctcagctccttcctacttcacataggtctcatgatacctgcttcattacctcgacagttcattgcgaagaggattgtgaaagacagaagatgcacttctatcaatgcctgcaagggtgaaagcccaggtggtaaccaactgccctctctccctaagacctctagtcaacagagcaatattgtcatttgacatcaacaccatcaacagcagcagcgttcactcactgctttaaagccacacactgctttcacctggattatctcaaatattccttacaacacccaagggaagacagtgggtgtgtttctgccttccattgagaggaccccacggttcacggaaacccagtgaggtgcttaagacactatggcccatggagtgtcagggctacacccaaagccagccatgcactcttgacctgtcttcttcaccactgcatttcctctgctggttcacacagccctggtaccacctcagagacagcaggtgctgagatggtgctggagatggcacacctgccctatcagctcagtttcccaccctctctcattgctgcagaccatactgtcgcccaggacctctgttctcattgcgtctgggaaggaatgagccatctatccaaagttttgagattgtctaagtctgttttctgttgcttataacagaatatctgaaaccaggtaatttataaagaaaagaaatttacctcttacagttgtagaggctgagaagtccaaggtctaggggctgcctctggtgagggccttcttgctggtggggactctctgcagagtcttgaggtggtgcagggcatcacactgcaagggggctgagtgtgttagctcagctgtctccttctctccttataaaaccaccagtcccactctcgtgataacccattaattgttaatatatgaatggattaattcattcatgaaggcagagccctcatgacccaatcacctcctcaaggctccactcaatactatcacactggggatatttcagcaggagttttggagaggacaaatattcatatcattgcaaagattagtgcaaaacttggctttaatggaattcagcataggcaacccccaggccagccctggggccatggacagaggcttccagctggtccacagagatcagcagtgttgtgatccaggtcttctattttaagggacatatataagacagatgcaacctgctagctatggagacacagaattcaagccgggcatgatggcttatgcctgtaatcccagcactttgggaggccgaggcaggcagatcacgaggtcaagagatcaagaccatcctggccaacatggtgaaaccccatctctactaaaaatacaaaaattagctgggtagcggcgcgcgcctgtagtcccagctacaggaggctgaggcaggagaatcgcttgaacccaggaggcagaggttgcagtgagctgagatcgtgccactgagatagtgccactgcactccagcctggagacagatcaagactgtctcaaaaaaaaaaaaatgaaagaaagaaagaaagaaaaaagaaagaaagaaagaaagaaagaaagaaagaaagaaagaaagaaagaaagaaagaaagaaagaaagaaaaagaaagaaagaaaagaaacacagatttcagcaaaaatgtgtgggttcaactagatagacaggggataggagaatcagttctggcttcattcagggctgaaattaagttgccagttctgactcccttatcaagtccctcattgtcacaatatgcttggagttgcctccacctctgcagggcctggttcacttctcataggaagggcacgtgttcagaagcccagacacaaatatcactggtcccattgagtcaagcaaccatgacatggaagtaatcgctctgccttggagagaatagaccaggtgactggctgcagcctgtgcttcatctatggggtggggtcaggctgagggagaaggacaaatccattgaaaccacatggacaaactgagagcaaaagatggggagttcttcaagggaaactaagatgggcttgctaacagacaagaaaatgcagcccaggtatcccaaaaccccaatgtccctgaaggcacaaggaaactctcatcctctctctcaagcacaaatatgaaaacgttttttctttagaaggccagagggtaggccgggtgaggtgactcacacctgtaatcccagcactttgggaggcctaggcgggcagatcacttgaggtcaggagttccagaccagcctggtgaaaatggtgaaaccccatctctactaaaaatacaaaaattagcaggcatggtagcatgtgcctgtagtcccagctactcaggaggctgaggcacaagaattgtttgaacccaggaagtggaggttgcaatgagtggagttcacaccaccacactccagcctgggtgacagtgatactctgtctcaaaaaaaaaaagaagaccaaagagtaaacattagaggctttgcgggccataaggtctctgttgcaactgctcgagtctgacattacagtgtaaaatcagccagacaacatgtaaacaaatgagtgtggctgtctttcaacaaaaccttattttagggacactgaaatttgaattatatatcattttcacctgttagaaaatactactgttttttcaaccatttaaaaatgtattaggttggtgaaaaagtaattgcagtttttgcacggaaagtaaaagattggcaattacttttgcaccatcctaatagaaaacatccttagcacacaggccacacaggcaggctgggtttggctcacaggcagtgatttgctgatccttgttcctgaacaaggattctcaggaggtgggaggcaaggattagggcttctctcactgtcaaaagggcacacagtccaagcggaattgtgcatctagggaacacggataagaaagagcttgaagggccgagtgtggtggctcacagctgtaatcccagcactttgggaggccaaggcggggggtcacttgaggtcaggagtttgagaccagcctggccaacatgatgaaattccatctctactgaaaatagtaaaattagccaggcaaggtgatgcacgcctataatcccagctactcgggaggctgaggcaggagaatcactggaaccagggaggtggaggttgcagtgacctgagatcatgccactgcactccagcctgggcaacagagcaagacttcatctcaaaataataataataataacaataataataataataataataataaatttttaaaaggcttgaagagatcatcggaacaaattgaaattcttagtttggttagcaatttacctatgtcctcttctgtactaatttacagagagaagtctattaatcattctggatgcagaaaggaaaccgcattctcagcataaacataaattatcagcctaaaactcaaattccttcagagggatgaggcacattgaaagtttcaaatagctcaaatagaacaaatggataagaagagataatgcatcttttgaaatacaaacctgaaaagatgttatgctcaattacactgacaaaagatttgggatccagcaatatcctctgtggaattctgcagctaaacaggaatgctaaatcacaaactccaacttaagcaagaataatatagcctaagccacattacacgcgcatccgttgggaggttgaatctgctctgatgtttacaaagtgcctctcttcgtccctataagaaagtgggcttgcctgctaagacccatgcatcaccaagcagccaggcttccaaattgcccatctgggtgtcttggaaagaaagcaaggttaacagaggtcaagagagttcatgatgaggcctggggtgtgaaggggcgggatctggaccctttggagggaggagcctccattctaagaagccaatgacagggaaagaagacacgggggaagatgaagacaaaagggagtttgagtgtggttgggggtccacagtgccacttaggcacaggcaaggagaaccatgacactgaactcaggccactccagccccagcatggccccagctcctcgagctggtacagattgtcccatcccttggaagtctctagttggccttcctcagccagtctcgacttcccaaaggggaaggctttgtctcatctgcttcattgcatcccacagcacagctggcacacagtagctacccaggaggtgatgtcctaagaagggcatgtgtgttgggacatcagaggaacagaaaagagatgccaggacctgcaaaacaagagctaccactgtcacattttccagaaggcaggctgagattctacatgaattaccagttagtgtcacaacacgtgttgaagggctgactcttggagtttgtaccctgggtgtcctgggagggagacagatgggttaaaagaaaagaagagaaaaaagagattctgaagaaatggaggggtggttcttctctgtgcagcttcaaagcgcaaatccaggccctacagatgtgtgctggaggaagatggtttgagctgcacatacggtaaggagtaacaagctcggcaatgccagcagctgccttatggaggatggagcttcccgccactggagctggttgtgcagtggtaggaaaatcagccccaagagtgagtgcaacctgcaagtaggtaaaagtaaggacgtaagttgtgtgaccacatcttgtgatttctggtgtgtccagctcaccataagacctgaactgagaaacagacccaggaggtagagagagctgtgtttagtagttacggctgcttacgctggactggaggacatagcttgaccacctaccaatattgggcttcccaattctcccccagctccatgcctagagtgcggtccctcatgtcaggaatctgggtgtccagggcagatgtctacacagccaggggcagagcatggtgtgctgtctgatactccatggagcacagatctaggaactccagatgtgggtcccccctgcttcaggaggcaggctgggccatgcctggtgtgccttcacgaggctgcaggagaggagaggtatccaggcttcaggggagtccctccccaccccataagagagactaagtaacgtggtcaaagaaaggatggaagccaccttccccacaccgagcactagagtctcccagaaaaggaagggacatttaccctccttgcaacaagagctttgcagggatgaatggaatccagacccattcctcaagggaggccatggtccttgaagtttccctagaaggcaccgaggacgcatgacaagcagctctttagccatctgctggggaaataccagagtaaattaaaacaagagtggatttgtgacttctgtcttttccaaaaagatagtgttggcaggtttatgagaaaaccattcccaaacaccttgaatttatatggcacgcttatttcaaaagctcttccacatctgttagctctttgaagcccctggaggcaggtagggcaggaaggagaactgggtggaggaacagaatcacagaggggctgggcaccttgccaaagaactctcggctccctggggagaggtgggggtggcaccctgcaccctgacccctcatacatgttcaggggctgctccttcttgcctggagagctctggccaagggcattatgtaataaggctggaagcaaagcgaccacttcagagcagggcagtcaagtacaaggagggcccgggagcacccctttctcatacacaaacacagccctgcacccatgtgccctgcaaattagccaaggtttacaggtaaaggaataatggctcctcaaacagaaacaaacagaggctgattgacaaggaggcccctcataatcagtgctacagtaaactctactaattatggtgtcaattggtaacattataaaggttgaagctacataatgaaaaaagagcgtacacacaggcagagtgagttcagcagatgtaattacagggtgacattattggcaaatagtattttatgaggtattagcaggaatgtggcatgaacacattccaaaacttaacaggctcctcagaagtgtaggaacccagaactggccagagacccagcccccaaaactgtagtttgtccagctgagcattttaggggagcccctgaggtcttcttgccatcttcaaaaggagaagacgcttacaggtgaatccctatcctacccttgacatctaattccttacatgctacatcatctccctgttccttgatggtcctgagctctttcatcctcatatcataagatcttggactattcaagccagagggcaccatagatgtcatttaccttgacagttactctacggtgagcatgggggaggaacagaagcctacctgttcattctaacaatatttactggtgcccaatagtattcatggaattctgtgccaggctcctgttctagatatgcaggctatggcccttgctgtcatggtgttcacattctgtgggagattgaagaaaaacacacaagatgctatcaggtgctatgaggaaaactgaatagagtgatgtgatacaggtggctagaagaggatgggcagattgaatgggaggtccaggagactgctttctgagctgagacctacaggaggagaggaaacatgccttttgaaggacacccagctcccaagcagcagagcaagggcagaacacaggtgtcctcacatgcagcccagggtctttctattgcatcaagcatccccaaccactacttgagccggaagagaagagacattaccaactctaaggatatgggggcggccattgcattgcgaaggctaaaggaacattaaagatcaggtggttcaaaatccctaatatgcaaaagaatcacctgtgttatgtgtcatgaaggagctgcctccaaggtctggttgtctgtttctatatagcataccatcacaagcttatatcacctttcccatttctatgaagtgctagacagttctcgttcatggtcgcctgtgtggactacagtcagatggtggctggggctggagccatcccaggtttcttcacgcatgtgacttgtgtctgggctggaatgactggaggagctaggaactggtcaggcttctttgcctatggcctcttccttcacaactaggttgggcttcctcacatcatggcagtctcagaccatgaaaacttgaaaacttcattcatggaggctgcctccacccagaaaagcatcatgaaaagcccaggcaaaagccacagggtttcccaggacttagcaatggaaggctcaggacattctttcttattttttataagtttatttattttttaaattgacacacaacatttttacatagttattgcatacaatatattgctttaaaatatgcatatattgtgatatggctaaatcaagctagttaacttatgcatcacctcacatagtcattatttttttgtcttgagaacacttcaaatctactgtcttagaaattctcaggaatacaatacgttgttattaacaatatccagtaaatctcttgaacttactcatcttatctaattgaaattttatactctttaaccaatatcacctcagttcttcccctgcacaatcccttggcaagcaccaacctactctctgcctctgagtttgacttttctagattccacatagaagggagatcatgaagtatctgtctttctgtgcttggctcgtttcacttaacataatctcctccaggttcatccatgttgttacaaatggcaggatgacaggacttccttcttttttaaggctgagtaatattccattgtatatatgttccacattttttaaatccattcatttattgatggacacttaggttgatcccctctcttgtctattgtgaatattcctataatgaacatgggaatgcagacacctcttcagcatatttatttcatctcctttagctagatattcagtagttgggttgccagatcatttagtaggcctatttttaattttttgaggaacattcacactgttttccataatggctgtacaatttacattcctaccaacagtgtacaaagatttcctttattccacatctccaacatagttattgtttgtctttttgataatagccatcctaacaggtatgaggtgatatctcttcatggtttcaatttgcatttctttgatgattagtgatttttgagcattttttaatatgcttattggctgtttatatgtcttcttctgagaaatgtcaattcaggttctttgcctattttttaatcggattatttgttttatactatcgagttgtttgggtttttcatatattttggatattaacccagcatcagttgtatggcttgcaaatatattgtccaattctgtaggtagtttcttcattctattgattgtttccttggccgtgcagaaactttttagtttgatgtaatcccatttgtgtatttttggttttgttgtccagaatatcctttctgccacaatgtattgatccagcaaataagtaagcccatcctagattcagaagaagggaaattagactccaccattgagtgggaagagtagcaaacaatttgcagccatctttaatctaccacactcctctagtgtagaaacattgcctctaccaaaggcctgcttagtctcttgacaacctaataaacatatgccattcacattcagattgtctttcttttcctcaaaacaatcaaagaattagcccatgtttattgggggcttatcgtgtaaaaatacttcatgctttgtccaccatataccatataccatacacaacacacagtgtgccgagccttccctctaggagtgtgcattcaagataaggtgtcacattattccattcgtaatagcttaattaactgttagagtgagatttgacatgcagcctcggtacataaaacaggccaaggtaggacaatttgggctacagtgggagctccagaacgcctctgctgaatcccagctcagagtcacagtgtgcatgacatcacagtggatgaagaaagaaaataaagggcaatgaaatatttcttctccctagaagcagctttcttgataaaaatatatgaaccttggctgggtgtggtggctcacacctgtaatcccagcattttgggaggttgaggtgggtgggtcacttaaggttaggagttgagaacagcctggccaacatggtgaaagcccatttctacttaaaatacaaaaaattaaccaggcatggtggtgcacacctgtagtcccagctacttgggaggctgaagcaagagaatcgcttgaaccccagaaggtggaggctgcagtgagctgagatcgcattactggactccagcctgggtgacagagtgaggctccatctcaaaaagcaaacaaacaaaacaaacaaacaaaatatatatacatgaatctggccctatgggagagctagtagagtaataagactttttagcatattaatgagttttttattaaaaatctatgtcaatctgacttaggcaaaaaaaaaaaaaaaaaaaaaaaaagtcctaggggttagcttgtttcaggtagggctgaatccaggggctcacaagatatcctatgctatcacaagatattagtataggatatcacaagatatcctatactaattaacatgtaatatactaattaatacaggattgagtctcctcagctttcacttgtgctggcttcactcccaggggcactttctctatgtccttgcagggacaggatggccaacagcagttccaggcttacttctgctgttgtgctctttctctagatcatttccaccaaatttcgctctagttggccttacttgagcgcaatgctcagaccacataatcagagtggtcagcagatgttctaccctgactggatgtccgggtagtcaaatgtaccctggagccccaggtgagctggtgaggtcacttgtattgagaatgaagggcaactggctccccaaatggactaggttctcttgcaaaaacaaacaaaaaggtagcctggaagctggggaggcaaaaacactcacacagaaaggaaagtacagcaaagaattgagagacaggaggacaagagaccaggtctggaagcggggggcaatgcctggtttcttcccacaaggtaacaggcgtgcccagctgtctaggtcttgactgccaatcaatgaacttctcttaaaagtggtactggggccgagcacagtggctcatgcctgtaattccagtactttgggaggccaagatgggcggatcacttgagctcaggaattcgagaccagcctagccaacatgatgaaaccccatccttacaaaaaatacaaaaaaaaaaaaaaagcctggtgtggtggcatgcacctgtagtctcagctacttgggaggctgaggtgggaggatcactttagcccaggaggcagaggttgcagtgagctgagatcaagtcaccacacttcagcctaagctacaaagtgagaccctgtctcaccgaaaaaaaaaaggggagtccctgcatccctgggaggaggctcaaagtcagaggttagcccttgtcctgtaccccgtcaccagctctgccttcggcgctgggcctatcaccggttctccagcaccaagatgtcctctgagcttggagagcacccagacatgtcccaaagagcttttcagtgggtgctttggcttgaaagaaagccagggaaagagaaacacaactgccacgtggcattctgaaacattgccattaagtttaatgccttcctaacaaagaataccacatttattatcacaaataaatccacagatttaacacccatcaggctttagattttatttttccatataaaataaatatggccagagtataagattatgatggcaccattattttctaaaactatttaatttaagcacagcccaactgccccatgctggacacaggaagggaccaccccactcctggaagaacactggtcccactgactgcaaaagccaacaaggtaggtttccccatgcaactgctgggtttcatcactgtttaatgaattgttgcactctttataggataaacaataaattgcacatgatttatcatattactcaataaatcatgggacaaatcattaggcagagtgataaaatcaagtgttttagaaataagttaatctatgatgccaatgtgtaaactaaacagttgcttaaaaaccctatttactaatcatttttacataaagaaagattaatgattatgtagattaaatgtgtatttactcctataaacatcagacagccatgtgccccgctggccttttctttttagcaaaggccccccagaagcattcctctcgtaacaaaatttcatttggaatttggcacgatggggaagggagggtggagaagcctgggaaggaggaagaagtggttaatgagaagcatgtcagcggaggggtctggtgcagaggctgttctcaccgtaaattttgaactacactaattaacacttacattagggcttggagacaggttccaatgctgcttgcttctcccatctgcccgtgacctagcgctctatctcacttgtgacaactatgtttatagcttctctgcccatcgagctggctggcacttcgaattaccctcaagagtccatgggcatcacgtcacatttgcgtgcccaatatcatacgtgacgagtcgtgccaccgccagggcctttaatgcacatcccacagacggccagcccctggaatgcataggcagatattaagctaaatctttttggagtcaagcttgtttcacgtcagttacacaaacatattggttcccttaaaagaacaaatgctttgtgagtaaggaaacgactccaggatggaaacttgagaaatcgttctcagtgtcaattcagcccttccttctgaaggccttttatcttagggggatgagggcagagactgtttggcttctagaatatgagttttggactaaatttattataaactggatattattaagcaatgtcaagggagaggaagggtgtgccccagctagtgtagcagggaagatgatcagaatatcagagaaggtgtttttctctcttgccactaaaatattttcattttgaaaatgcctaattgcatatgattcctctgactttgaattcctctagcacaacaaatcggactctggagctgatccaaacaatgcacagggaagtaaaggcacttcgatgtgttcttacacattctcttttgcatgaagtcatgctagattgcttgagaaagtgctaatcaccaaggtttgggaactcccattcttggtgcccagcaaaacagttgttgagaggttgagtaaaggatgggagaagagagagactccaaggactgcactgtgttatcatttttctgacaagctctaaaaaatgaaatggataaattttactgacaacttcagcttcaatgaactacctggaaaatattgcctccaaggcagaaatccaagacatgagcttttacacgtggtccttagcccttcccaagaggcagaacatgaggggttatgggaggaacacaacaggagttccagctccttgtacatggccttcccctgagaagccactagctgcagagtggagtacagctctcagacatggagaaactgaacccaactaccaagataaaacaagaaaaaggtgcaaagcaggtagtatttctaatgcccagaaaagaatacaccaagtgacagccacactgcgtcctcttttcccttctccttatccaacccacctcaaaatctaccctgagtcacatttcaaataccacctgtatcagtcaaggggaggttgagtttttcttcagtaacataaaagatcaaaatctcagtagcttaaagtgaaattttatttcttgcagctgcagcgtcaccatgggcccagggaactggctaggacaattgtcctccctgtggtagcctagcaattggtttaatgttaacttcatagcattatggaatttcctagcaactgaagaaaagagcattcagaagcaggtgcttcaatgctttcaccagaacggacgcaccattttatttgccagaatgaaccatgtggccaagcctaacttcaacaatgggaaatataactctccattaaccagaagtagagaagaaccagatcttgagaaatattcatcagactgatcacacagcccacttcccagaacccctttctctgcagccacatcattccctgcaaaatctgaaaagcaaagctttttatttgtagggctcatttcccaatatcttgctgttacaatggggaccgctttcatccttaaaacagtggtttatatttctgtcagggacagtgagaagcaaatgtgtgtagtgcattttgcaaagaagcaatacagtggccaagaatgtgaattctggagccagactgcctacccttgaaccccagctctgccacttactgcctctgtgatcttgggcaagttattcacttctctacacctcagtttgctaatctgctacatgggactagtgatggtgcctaactaataggattattgcgaggattaattatgctaatactcactacagtcttataaagatgcctggcactgagtgagggctatatacgcgttttctgtgactataatgcttcactgtcaagaaagagcactctaaaaagtgctccactggcctgattggtcattataactaatctgagagaccatctcactccctgcgtccttcatcctctcccccatcccagacagaggccagaaggatgttgtgcttaaaggctgaggaagtcctttggaaatgaaatttgggtgagcggtggtggtagtggattatttgctctgcaagtgaaaatgggaggattttgaaagaatgtggcagaaacagtcatgcctgccaaagagtccatatgtcccctacattccctagccttcttgtagttaaaggggccttatggctagccatagccagtgagctaggggcagaagtaacatagccacattctgggcacaagatctgcttgctaatgcaaggtcctccagaattctgctgtcccatcacaatcactgttatgtcatcacattgtgaaggcaacacctggattgctgtattacactggaggatgctcgtggaattgcatgtgtgaaaacttttgctgagttaaccctggatattttacagtggttcgctgtgatggcatatcctagcctaaactgactaatacaaggggtttggctcctaaaagtaacagcaaagaacagagaagatggtcaagctacagtttggagtgtctgaacatttcttaagaccaagagtagttcgtgacaatcttaaggcattttgcattgctacggtgtatatgccttctatctctccttttctgtttttgttttactgtgtttattgtttattttgtaagtgtttgcacaggtagagcaactaaagaaaaagactgcgctctatatttaggctgacaccaggacaacgataaagaaagagctacaagtcaaagcctgagctttgcagcagaaagttagagctagacataattaagataacatcacaatacaccctctctagatatcttagaggggaccttaaactttccacaggatatacagcaaaagattagtcagtctgattctttcttaagaggtaggctgaacttagctcacaaaagcctaagttaggatgaacagtaattaatatcatctcacatattcagatgacaaggaaacaaaaaggattcagagagactgagtaactttctgaaaatcacccagaaagaaatgtagtgaatccaggactagaactcagatgttttactcctaaggtaatatttatatgtaggccaatctccatagagtcaaatttgtcagtaatccccatgttgctaaatccagcggtcaattctcaggccttggttgtggacatacctgcagcatttgatgcaattgactattttctcttctctggagaactcctttcaattggctttcagagcacaacactcttgggtatcctcctgcaacactggctgcaacattttagtctcttttgcttaatttctttcttgttttctcaaccaccatgttgagggtgcttcagagttcagtttttgttttatgttggtggtggggagaaggtctcactctgttgcccaggctggagtgcagtggcaccatcatggctcactgcagcctcgaactgctgggctcaactcaagcgctcctcctacctcccagcttcctgagtagctgggactacaggtgtgtgccaccacgcccagttaatttttgtattttttgtagagatagacaggattttgccatgttgcccatgctggtctcgaactcctgggctcaagagatttgtctgccttggtctcccaaagtgctaggattattgacatgagccaccatgccgggcccagagttcagtttttagatgtatgttctagatattcatcttcttgataactttgtctagtttcatagttttaaatgccatctgtatactgataaacctaacaaatgtataactctcggcctctcccttgaacttcagaattgcatctccagctgctacctggcacggctacttagttgcctaatgggcatctcacagatttaacatgtccaacgctgggcatccaatcttcctctcttctccaacctactcctgcacagttttctacatttcaaccaactgcagttccaaccttcccattgctgagcccaaaaccctggagtcctccccaatgattttgtttctctttcattctgtatccagcccatgagcaaatcctcttggttcttggggggttttaaacagtacaacagctgccatcgtggtccaagccatcaccttgactcgcctgcactcttgtgttcgcctcttggttggtctccttgagtcgcctttttcaagcctttgctgaaacatcaccttcaatatgaagctttccttggccaccaaatttaaaactgatcaactcccctttctgtgacactcctaagacgctttcccccggcacccagaagcttctctcatgttacataattttcttatttattttatctagacttcatctccctcctaccagaaagtgagctccagaggagctgggagaatttgttgtgtcctagggtgtagaatcacgcatggcacaataacttttgttcaacgagtgaatattgaggactcatgtgctccgcagcctgacctgccaccctctgccctctccttctagtcatgatctggctgttgaattccttctcaccctagtttttctctccacccaggtgcttcaagctggtgtcttgaaggacaggctttgtcacttctctgccagctcccccacatcctacttcttaaacatccttcctggcttctgcagcagcagatcatagaatcgtctctgcccgttcatcagcctcaaggccctgatatacttttccattcactaagtttatgctctgcttggttggaactgggattggaaattttatggtccaggaatcccttttcctttgctgtgacatttttttcccgactgctccaacccatattgaactgatttcccccatacctaaattattttagggcatggataataacaataagcattacatacatttctccctgaatgtttgtaacaatattagagagatattattattattattttatcaacaagaaaactgaggcccagagaagttaactagttagccaagttactgtgagataatagagtaaaaattctaatgcaggttggtctaaattcaaaccttgtgcccttggccctttcatacttacggtcagaaccaaagttaaattcttagtcacttctaattatttcctggaagtgggattcaagttccctgggggctcatatataggaatggtcatacccctaatctgtctgtgacctctttggagcctggtttagaggagtctttctggcagattcatcaggttcggtggcctttggtgggaaaggaagaaaatgggacaactttatgaatcattatacaagaaagaacatcccaatagaaaactgccctgcacggaaactagaaaaccctactccctttccctcctgcttcactactgcatcttggtgaaaaccacaatggcacatgcatgcttattacgatgggaaagaaagagatagataggtgtgtttttatattttccaaccaaatgatttttctgctccttaagtgatattttcagagactattgttactgaggaagcagcctcctataaatctggaagcagctaatataaatctaaccatccgcctacctatgtattcagtcccagggaagatacgaagtctcttccttgtagggattacgaagaagcaggtacaagtgacaaatcaaagagcaaggtaagtgactatattcatgcactgtgcttctagtttgtaaggcatgttctcatacattttatgggcactgtactaatgaagagctttgaacaagttcatagactaagtacgtagatgattcagggttcaaacccagttttcagactccaagtccaatgctgttggcaccaatacacactggaaggttccatcctgatgctcacataagtaatacactcagacaatagatgagatctgctcttatctccttattaattaccttgtgaaggtcaaaacttaactactagcttctttgtgctgttatttagactccccggggactgccaccttgccttgagtctccaacatggctggcatccctggacggtagaaattacatcttgcacatcatttatttccaaaggatgtccagcaatgctctggaggcacagcaatgctcagaggccagcaacaatctcccttggccatgcaatattccccagctgttctcatccacatagaactggctcatcttcaaatcaggtatgcagtaggtgctcaaaaaacacatgatagttgagaaaatatggagcaaatgcaatcgtgggctgcaggatacctatacccacccccttgacaatatcattcctcctcttgaatttgggacgtgggtcagtcctgggaacaagagatggcttgagcatgtttggatccatgtcttccagcagccatgggaatcaactgcagaccctttgaacatgacatgccactcaatttttttggtgtgatggaaaatcccacacccccataatggccctgtctccaacccttccaccctcaggttgtctctcaatccttgatgtcaactgccaacctctcagaccaaggcttgggactttgccatatgggatgcctttgattacagtgggggtcactatgaacaaggattgcagagttgttcagaggagattaaaaacctgccccatcaggcagccagtgcatgcccaagccaagaagaaagctaagaatctccactcccactttatgatctaaccactagactgagctcctgttacttgacaaaaatgatttgcttttaattaaaataggagcataagctatttttatccctatattattgggcggtaagtaaattcacagtaactcactggattttttaaaatctattttaaatataaacacactgccatattttctgtgggtttgaaagcttatgttaagtttgcaaataagtcaactccataaagataacatctttccctaaaaaatgtgttgcaatctaatggcatgctatggaaaattaacatcttattaagaaaatacatgaattctccctccgttgaaaaggtccaaatagcgctgagtttcttacctgcccgtgagacaagatggactgatggggtggcctccaagcctccaaacccaggcaccccccaccccaggagtgtcctctgccaccctcacgggactcacatgtaacaaaaagctgtgattttattttgggtcatgctgaactctgtttttgaacttatcctgttacatgtctgacaggtcctgtattcacggagggacctgcattactctggttcaccctgaaaagatgccatctcagacaggctgcatgggaaggtgcagtgatctcccagcccagctgcctgtctgaacaccagggatccaggtgaatccccataaggataaggacattaatagccagatctcacatggccgtaacaattagagctcagtgatggggacagagccctggacttctaacccattacaaggaacgtaaaaacccaaggccacaaagggctaggtatcatctttagatgcgatgagagctcactgtgcactgctccccaagtgaattcccttctggtcctgccttctatgtatcttcttttccccactccactaaagagtgttttaggaacctagcagatggacctagagccatggctctttcttgtgcctcaatgacacatgttttcaacaccctgccctgggcctgagcctttgaggggttccaccgatgccccgtccaaacctgcattcaccttgcttcccctttccctcctctgaccactggttctcagaaatcttaccaaaatcaaaggacttatgtaaatatgaaaagggaaaagctgtcaaaacctgcatgagttgtttaaataccatgaataagaaccagtaacaataggcacatcaatgaagatgtgcttccttcagacttggccaggtgccacccaacgcgagtcccccagaaaacgctgctcactcggcaagcaagggagcttggctcacccgccccttcccggcgccccctccccaggaaaacatttttgacaagcaactcatctagagccatttcccacagctttcctttcatttgcattctcattagaataatgtgatttcgcagagtgggaatgtgtgtaagtcttcaccaccaggaggaaacgctaaaacccagattccaggggacaggggaagatctgcccgtggggacacagggcagccaggaggagccccgccagggcttggcatgtggcaccagccagggtcagtgaacgcccacagtgacatcacagccaaacaaccgggaccttatgaaaacctcgaattgacccaaaccggaaaggaggtttcgaaatggaagaaacacatcccccacgttttgaaaaataggccctggcatcaaaaaagagtaaaacaaagtgttttcacagagaatgggaaaagcatgccttttgctttctcctactgctttgttttcttgaagatgcttgcccctaatttaaaattgccacatgccaacttttaaaagtgctataatggaatcagtttctctaagtcattccagggcatgacttatagaataatgtttttagtgtacccactgtgtgtgtgtatgtgtgtgtgtgtgtgtgtgtgtggtgtgtttgtgttttaaaaggacatttactgagtgatatcttgtaaatattttttggtcatttaaaagcaagaaacaaacaatacaaacatcctaagttctttcccacatcctaagctgatttccattctactttgggaggtcgggtttcttttatgtcctgaaaaattggaaaagcttatgaagccaaaaaactttgcaaagcaaattttccagtatttgcttagctgggtcttcaagcaaggaaagaaaccgtattcggtgtaaagatacataataaatgtctcagaacaatttcaggacagaagaggagttgagagtgggggattgaaaacggagctggaagtaggaaaatggggcaaaatattgagtttcaaatgactgtaaaatgagttcaactccagaggagttccttctggagcacgttttccagccagtccttgtaaactagatctccctgcattagcaagtcttaaggagcgaagaaaaaaagtgaattaataaaatgttcctgtgcaacattgtcctaccctgctcagagatgctttctgggcttccttggggcaaactgggatcacgttcagcattccaagtctaaagaaacagaaagggaatgtgttccacctgccgactgacacctctgtcctaggtcacctgccctgaagatgctaaatgcttttccaacgtggtgtaatttgagtttttttatttttttttaagattctatgagcatatcacatttcataaacataagaatgacatttcaattttttcatataaatggcaaatttgcagaatgagagaaaaaaaacaagactctagaaaccattttttgcacactcaaagaatgtgagcacagcccccttctggcaaggacatctgtcactcacacagacgcaaccctcttgaagccaatgtaaacagctccttactctccctgcctggctcttgggtggaggcgcagaaccttcggcggtgtggatggagcttcctttgaaaagtgcatttgcgttttggatagcttggcgaaaagcacagagctgttttctggggtgccaaactgtttctattttcccattaaaaggaaggaaggaatatatatattcctaagtggaagtgcattcactacatacgcagacggttacaaaatttgggcgaaattaatacaaggcaataaaaatcatttagcatatagataagtcaatttatcatagactttctactagaagaaacatgagcgttctcggccatgaccctgacaaatgtctctgggcccagttctttaagcgtagtcatcgggcgggctccgagtccctgtctcgggctctgtgagtgtctaataaagcgtgggtgtcaggagctttgtcagtgcagtctctgcctgtttggttcatctcgtctcctgaataaagccctgcagtggcagtgcaccgcgactgagatagcttggctgacactattgatttccatccacagtacactttgtcaaaaatcaaatagaaggccctttggaccctttcacctttaccaaacacaccacaaataaacctttttatataaagcaggagaagggccgctctgtgggaacattgtctccttgggtaaatgttaccgggagccctcactccagtactccagcacaaacttaatcacaagccgagttgagcaaggagtaataaataatctggtcaaggtactggaagagagaggggctagatcggagccagagactgggcaagattgagagggaaaaagacagagggagggaacgagagaaagaagcaaacattttaaattttgttctgtgaatcttttttcccactttatttttttttacatttaaattaaattcaaatatagtctttttaaaattgtaattagattcttttttcttttttttttttttaaggaattctttccccagcatccactaagtaaacattatagcaaatacattactggtcagatgtatgcattaagtatgccataaacctttctactggccaccgactctgctcccgctccctctctctcctgacacagagaaaatattatgcagtgactcgtttctagtgaatccgtgtgattcattgcccaattttaaactgccaagctgctaaattgcatcaggtctgccaaaattcattccaggactacgaggagatatgaaaaattaaatgtcatcttggtacagtggaaaacttttacctttcagagaacagaatatgctacattctgtaatgatggatgattgcccgtggctatacttaacctacttagtaatgtcatgtagtggaaagcatgtttacctaaaaaaatggcagaagacataaactgtatcaaggtctgacatcaacgcattttcctccaaataaagtgactttttatgttgattctccgatataaaataattttttctcatcagcatttgcggctagtactctgtgttgcgagggtaaggaccgaggcacctcggccattctctctctccgttctcggaggcacaatgcctttgtgctacctgactcaaaaacgctgctatctgttccggccacagcttaatcacataagtccctaagaagggagaagccgagataaaaatatttgaactgttgaagaaatacggactcacggaacctacaactgagtacaggaagaaacattttgcataacgactccagcctgcctggtaatttttctcttgagcctagcgtttttctgacagcttcatttgtttaacacacaactaccggcactcttagttctagattatgataccggtcttcggtgcattattatatcttcgctaaaggaggaaatttgggaatacctggactctgatgtctctaaaatgtatggccactgagggtttgctccgattcctattatggcctcatcttgcaggcacatgcaagatgttcgcctaagaactctcagctcagcgaatcccggctccttcctcagtgccgaacgcaagggctgtgatatttattattatgaataccatttgtattaatcattacgataaatgactggtttggctatctgaatgcctcatttagagaaacttctctcctatgtcattgttataaattactgccaaagctctgtttcacccaaggcggcttcattcactctttcatatttttctgtccaagagacgttgttacccatcctccaagcaataggctgggagggcaattgttatcattgcaaagatgtccacatacatggcaacagagagttgtggattgttgtgggtgatattttttccccttttaggtgaacaagaggtattcttttcacatctatatttgattaaattattcagtgctacaaactgcaatcatgctttattaaaaattattacaaattcatgcaaggactacagatgtgaaagaatttattgcctgcttgtttttctaatttgcatcattgattttgcagggaagagttttaaaaacaatctttattacatagattttaaggggaaatcacagagtaatgtctcgtaagatttatgatgtactgcgtgttgattttatttacatttttttttatttctttgcttttgaagaaaggttgaaagataaaattaggtttgcacttgtaaacaatgaggcacaaagataaaaagaaatgtttttctaataaagcaagcccacagacatgaagtgcagaacgtaaggtcagaaaacagttaccagcttttgagtcaataagataaaagggataatgaattatactgtaaacacctaaaacacagcacatctttttatgttgttaaatccatcttctcaattcaagaatgttatttgaacaattcatcatttatagagagcgccagctatggctcccacatagcatgttccaacatgctgcggtggcactggtcagaaacccctcatttataacaacccccgccataatcaaaagtaaacccagaagatttgatgcaagtcaaatggggcagaaagtgactggttaggccctcctagactaaataattcactaggcactagagagagactaaaccaatgcatgcatgtctcctaaagaaatgaatgtcacattatattataaccaatttataaacatgaaatatgcatgtttaatttgcacttaaaagtttaatttaatgtagaagacattacttattctcttctttgttcaccctggctaacccatgaatgattaaagagaagttagaggactcctgtttccttttttttttttttcccaaagaccatctccacagtttcccaactctgcttcccattgaattctgagcaatgactggctactttagcaattaaaatccaggggcaaagacacagcagcttcgttgggctgagagactccgccattcatcatctcggctgccataaaatagcactagatggaatctttgattttagctttagaagatcataaatcaaaatctaaagcacggctgtcagaggcatcaccaggattatccattggagaggggctggagtgcagggcacacacaggcattgttcccactgaactcacctcctgatgcatagagaaaactcctagccaagcacttgctggtgtataagtactttatcctaagtgacccataaaaagactctcaaatacaaggtttgataactacagtcacagtaattgtacgcttgatatgtctgaatataaaataaataggcccgcctggctgggacccaccctgcccagtcccctgccctgatcgcctggtcagctcccttacccatgagctggctgagtcctggataagggtgtctgttggcgagagaggcctccaagtaggtgcccccacctgcctccccgacagtgagatgactgcaatgcagggatgatgaccatgatgggagagatgcagctagagggaatccatccccagaggaaagaagtcagccttgcacttatcagccccaagttcatggctcatgttcaattgaaagtaatgagtattgatatgccctgtgctactgaacgaattagagaggagagaagctcaggatgaccctctcaatacaaagaaagatctcccctgaaatctcactttaagggaagaacccacatgtgcccacccagttttcgcaaaccatgttattatacttcttggagcaggactcgttcctttactgcaaacagaatggcgtggcctttgaatccagattatgccatcccagcagtgggtggtcaaaagggaaaggttttgttcttgtgaatcagaaggaagcaggccaacattttctccccctctgttgtttctgaagcttttaggccactggctcagaatatcgtctagcaataacacgtccaatagcaaaggaaaagcagccgtgacccgtggccgagagcatgcatttcagacaggtgtccggctaattaaaagaaaccccggcccaatttagagaaccccaagatctctgaattccactgtgggttgctgcatgctcagaccctccgatccctgcaaccaggcctgctctcaagccatgtctcagacattggtggttccaaggcagctcagtgccggtttgccttagatgagcttgaatcagttttcgacaaacagctggtatgacggatggtgatacccggaagataaacagcatgccgtgctttataagaatcttgactgctaatttgaagtggaagaaagaggtgccataatgagccagcttctcttgtctaaacgtgggtattgaacctggctgccttggagttgtgtgtattcacttggtatggacattgaccaaaccaggagtcggcgttccagagtgggcgccaggtcttgcctgaatgtgctgtctgcctttcaaaggaaccaggtggtagccacgtggtatggcttctagacctggttctgagacttggctgcaaaatacaattcccaggaggcactttgtcaaaatgttcatgcctgagcaaagtcactagagattctggtttaattggcttggggtgaaacgtggacatgggagttcttagaaagctcttctggtgattctaatgcagaggcagggttgaaaatctctgtgctagactagtgggtcttgaacattttggtctcggaacccttcagaatgtagaaattctgaaagttttaaggaccctaagtgcttttgtttaggtgtgccattagaaattaaaactaagaaaattctaaaatctacatgcagtcatgtatttaaaaatgaaaataaacctattatatactaacatatctagaatgttttcatggaaaaaataacagtatgttcaaaaagttagtgacaagtatggtgtcttagtagctctttgcaaaccactggcttaatacagaagtcactatatgaaaaaggcatgtacacgcccatatttatagcagcacaatttgcaattgcaaaaacatggaaccaacctcagtgcccatcaaccaataagtagataaagaaaatgtgtatatacactgtggaatactgctcagccataaaaaggacaaaataatatcttttgcagaaacctggatggagctggagaccatcattctaagtgaggtaactcaggaatggaaaaccaaatatcatacgttctaacttataagtgaaagctaagctatgaggatgtaaaagcataagagtgatataatgaactttgggtatttaggtagggggaagtctgggagggggatgagggataaaagactatacattgggtacactgtacactgcttgggtgactggtacaccaaaatctctaaagaactcattcatgcaaccaaaaactacctgtaccccaaaaactattgaaatgaaaacaaaaattgtttttaagaaaagacggctagattctaatatctgcttccacattcagtcttgcaatatgttgtttctgttcaaatctatgaagaaaacctgacctcacacagatgtcattggaaaagggaggtatatagtaaaagccctttcagataattgtggatgttctttgatactacaccaaaactcagcaactggtagtttctcaaaggttagttgcaatgtgaaatctgaaaatatataaactttttgtgctccattacattaaaatccactggtctatcttgatatttgaatggatttttttaccattacatgattttattacatctagcacaggtcacttgagaaatattagctcaatgagtcatgtatgcagatcctgcagtgttgacacatccattattcaatattaaagaaatcacatgtgttagtatctctttaactattggaaagctatcaagctcacggtggctgatacaagtttttcaaaattcttgaaagcttgagtttcatcattggcaacaaatactgtcacttattttcttggaagtgacagaattaatttgttcattttccagataatgtctgccaaatagtcaagtttgaataaccatagtttgtctatcagttgttctttcaagtaaaaatggtgctctctgaaaaaaaaaaaaagggcagggaattcagctcacagttcagaagattggcaaaggtgcttttccttgaggcagctgtggaacttccagatggggcagaggtgctctatgtctacctcccacttcatcacaaagaacattgaaaggccagtgctcaaatattgagatttaataaaatgaataactttcaatatgtcatcaagtacattcttgttatttcaaattcataatctctatactttactcgttttcttattgtggtaaaatacatgtaatataaaattttccatcttaattattttatattttatttttttgagatggagtttcactttcattgcctaagctggagtgcaatggtgcagtctcagctcgctgcaacctatgcctcctgggttcaagtgattctcgtgcctcagccttccaagtagctgggattacatgcacctgccaccatgcttggctaacttttgtatttttagtataggtagggtttcaacatgttagccaggctggtcttgaacttctggcctcaggtaatctgcccccctcggcctcccaaaatgctgggagtacaggcatgatccaccgcatctggccccaacttagctatttttaagcctacagtgcaattgcattaagtagatcacgttgctgtgcagccatcaccatcatccatctccagaactgttttcatcttgcaaaaccaaaactctgcattcattaaacaataactatctgttcccctctccccccagcccttggcaaccaccactccactttctgtctctatgaatttgactactctgagtacctcatataagtggaatcatacggtaattgtctttttgtgactggcttatgtcctttagcataatgtcctcaaggttcatccatgatgtagcctgtggcaggattttcttccttttttaaagctgaataatatcccattgtatgcatacactacatcaagtacattcttaagtgaaactggcttttgttttttctgcacatgcatggcagtaaagaatacagtgatgactagtacaggtctgtgctgaggagacaacagttctacccaccctgagtacaaaatggaaaggcaaaccatgtcatattatcacaaaaatagcgttggcttttcagacaccggaaaccatctcagcaaatttacaacctaggttctatgttgcaatttctacttacacagtggattagtccatttccacctgcttataaagacatacccaagactgggtaatttataaagaaaaagaagtttaaaaaaaaaaaaaagaggtttaatggactcacagttccaggtggctggggaggccgcacaatcatgatggaaggtaaaaggcatgtcttacatggcagcagacaagagagagtgaggaccaagtgaaaagggtttccccacataaaaccatcagatctcatgagacttattcactaccatgagaatagtatgggagaaaccacccccaggattcaattgtcttcctctgggtccctcccacaacacgtgggaatgggagctacaattcaagatgagatttgggtggggacacagacaaaccatttcacacagtaaagtagaaagtcttcaaaaaagaaagagaaaacagaaaatgcactcatagtcctaaagcccagaggcagccaccatcagtatatgcgctggtatgttttcttatcaaggccacattcctgaaatgttttgtctttatgatgctgataagcagggaaagggccaaaagacactgtactggacagatattttcattctctctacaagctctagaaaaacagaggacaattaaattcaggactaaaccaacatttggaaatgtgaacgtaattaattccatagaaatatttagggaatatttgtctttcatttttcctccgtaacatcttgatatagggagtgtgagaatccctggctccttacctctaaggtccttgtttctaaaatgtgggtaggccatggtgcagtggctcattcctgtaatctcagcaccttgggagactgggtgggaggatagcttgagcccaggagatcgaggttgcagtaagctgggattgcaccactgcactccagcctggacaatagagcaagactctgtctctaaaaatccaaaaataaataaaatgtgggtaacggtggtctcacactggcccatgggagagggttagtgatataatctccacttagtgccgagtgagaagttggcatagaggagggagctcaccaagtgtccattgtctttcaataaatactaatataagtaacaataatagtaataataatcatagtacctctcagatacttatttgctttatcttattaggaactcacacagcaatgagattcagaggctggcccaactctgtttacttagcagatgagtaaatgaaggttagaaaccctgagagcacagaaagggcccagacacaggaggcaggactgccagtttcaccagggagaggatccctgaaatggatccctgtacctccctgtgatggttaatattgagtgtcaacttgattggatcaaaggatgcaaagtattgtccctgggtatgtctgtgagggttttgccaaaggagattagcatttgagtcagtggactgggaaaggcagactcaccctcaatctgagtgggcacaatctaaacagctgccagtgcagctagaataaagcaggcagaagaaagtggaaagactagactggctaaatcctctggcctccatctttctcccctgctggatgcttcctgcccttgaacattgggctccaggttcctcagctttgggacacagactggcatccttgctcctcagcttgcagatggcctattatgggacctcaccttggggtgaatcatgtgagtcaatactccttaataaactctcacttacatatacatctatcctattagttctgtccctctagagagctctaagacagattttggtaccaggagtggttctagaggaacacaatattaaggatagagttcttaaattggtttgggggtttctggaaaaccctgactaatgcactagggagaagttccctgaaatggatccccgcacctccccacacctccctgctggtgctgtctcactaccacactgcactagttctaccattcatttgaagttcctcctttaaaatgactcactttttttttttacttaaatagtgattgaaaggaaagttatatgactactgtaaaagtaaaacgagcattacttgccacaaagaggcagtaacaacaaatttaaatatatagctatctgaatagagggtgttctccacgtatcactgaaagtcacctggtggcctcccagaagcatgtggtcctgggctctggctctgagtggagcgtggagactctgaaaagccctaagtggatgctcagaacatctacagccatagcaccagctgagcgctattacaaaccagatacaccactcaggatgttctatcatttgtattcctgtgatctaaatacttctccgtccaaactttcagggcggtttctaaatgcacaaatatttataggtgtaaattcaagtgggtggcaggtattgtgtcaggtgggtaaggcatatagaacaggagtaactgagatgattctgccaatcccagagcttggatggagagctgacgatgagaatgcaacccagggacaaggaggagggtgctggcctttggtagcctgcaaaatggaagtctgggtggtctccctcagcacttggcaagaacggtggcccccactggctgggctccagagctgagagtctgtggatctccctgtcccatgagcccttgaaacagagagtggaataagacaagatggtgacaaaggaagtgttaacctgtgctaccctctgcacctgctcccaacagccttacaaaggaacatttaattcccacaaaaaaggaaacagatgttgtcctgttaataaaacaccaatccttaaaatcatcatcctggccaaatgctatggtcctccctaataaacatggatggctctgtgaccggctggattaattaatacccacaggttcctgaccttttcctgggcacatggacagtcagtccccccaagacagatgacccgctggctcgcctctgcctgtgatgtgtgcgtgtccttcttatgcgagagacatgggaccagaatccaagtccccgagcgagcctgctttctgttccagagtaaaataaacataaaaataaaaacaagcctgcctgtcgttgacgttcctcattgcacaacaagcgccttataagaaaatcagtatttgctgattttccaacaatgaaggaaacattgttctcttctaatgaaagggcaagatttcattttctttttttaaagcaataattcccaccccacccctccccaaggaaatggtaatcatgctctctttgtcttacctggttggggaaatagcatcacctgagtcagggtcttgactggagagtcagcaggtccatgcctctgtgaatacatcaggagcaggtggggcctccaggtggggtgtttggaggcccctattcatggacaatcaggaggatcctcaaactaagagaaggaaatacatggagtgttccggtttccatgtacccccacgcttacccttacacctacttccatatacacagggctttcaccagtcgcaggtctagcctcacggtcttgttttctaatttatactaaagtatgaacagccatcccaagcgtaatggggaatagggcagggagggcacacagatagaagtgggcacctcagtttgctgtattagatcacatccatgttccactatcacagcctgaggccacaaaagcaaaacaaaacaaaacaaagcaaaaaacccagtaatgacttgtaccgctcaggaacatcatagaaaatgaaacatgagaatacacaaaatcagctacagaaacaatgaaaaggtacatctggaacgattcgacctggggcagcataaacattgcaattgtttgtagtcaaggtagaaaataaaaacagaaaaatacatgagcgtcatcttagggaaaaaccctccccccgatcttgggtcagtgcagggaggtagtcaaagtgcaggtgggaaagcccagtgtcaaagctgatcataccatccaacagcgacttggctttgatcaactgtatttagtttttctgccttcatttctgtgatggttgattttaggtgtcagcttgatcgggttaaggaactcccagataggtgttaaaacacaacttctgggtgtacatggaagggtgtttgtggaaaagattaacatttaaattgggagaccaagtaaagaaggtcggcccttgcccatgtgggctagcattgtccaatccatagattggctttaaaaggtagatccgatggatcaaaaaggaggatgaaggtgaattctctctctttcttctggagctgggacatctcacttctgctctcagctgtcagagctccaggttctgaggccttcagactttgggactttctccagcagctgcccatattctcaggccttcagattcagattgaatcacaccacaagatttcctgggtctccagcttgcagagggcagatcatgggagttctcagcctccacaatcacgtgagccaactcccataataaatcccctcttagttttctcaaagaatgaaaaacagattaccatttgacccagcaatctcattacggggtacagacccaaaggaaaataaactgttctaccaaaaagacactgcccttgtaggttaatcacagcactgttcacaacggcaaagacatggaatcaacctaagtgcccaccaatggatgactggatgaagaaagtgtggtccatatacacctcagaatactacacagccataaaaaaaataatgtcctttgcagcagcatggatggagctggagactattatcctaggcgaactaacgcagaagcagaaaacaaaatactccatgttatcacttataactgggagataaactgggtacatcataaagatgggaacaacaagcactgagttacaaaagggggatggaaaggagggaaacaaggttgaaaaaaccacctactgggtagtacttattgggtactatgttcactacttgagcaatgggagcattagaagcccaaacctcagcatctcataaaatgtctgtgtaacgaacctgcaaatgtaacctccaaatataaaatttaaaaagtaaaataaatccctatctacctatcatctatctaatccatctgtctattatctatcattgatcatccatccatctatcatctatctgtctatcatctgtctataatctatttatctacctctatttatctatctatccatgcatttatcctattggttctgtttctctggagaatcttcatacagcttcccatctataaagtgggtggaataatagtgcatatctcataggatgttaggaggatttgtggggaaacatcttaaatggaacactatgactttttgctactctatggctatacttgggactactgtaaaataagctcttcgtaactgagaaccaaaactttcaaaacaaacatctgcctttcagggacatgttgggttgagagtccccttttcaactaccacctcctgctcagcttccctctcctgggtgggcatggtatggggcagtgctttgtgggggatcacacaaccctctctgggaagcaattgatggggactgggaggcttaggcatagctcctgcctcctctcccttctaacctgagcactcagacaagtggtttaactgagtacagctcctccttgtctgcactatctgccatctggaaggagataacaagaatatgcaaatatgtggttctaacacctgaccttctaaaccttctggcttctgggtcccagtgaggaccagtcttgacttttacgagttctcagggcaaagacatccacacaaagatagccccatcatgttcaaccaaccctgcccaaagttggagcgccccaccctttaacttactgcttatttactgctatcagtaagcttcttttgttctggctgccaggaagttcaaagaaaaattaagtgttcaactagagcaactatgtaaaccctcatgttaaatgtgtgtattacttctacatgaaagggtttttttttctttcaatacattgttgaaatattctattgactagatgatttttttcaaaggttaagaggcagagaattccccagtggggataatacaattctaaacaagcaggatataggatcacagcggtgaaacacaccagggtttggtctaagagtttctgctcaagagactgatgtttcagtgaatgcctcctactatcacctccactataagctgaaggaataacaggaagaaatgaacaagggcaggtggatcgggagtcagaacaccaaggttctagccatggcgcaccatttggtagctgtgtgaccaccctgtacctcagttatctgatctgaatctgtgaaatgggatataatgggaagaatgaggccaattctccctgggcgtctgagggtctaggattgctacaagggtgacatgaaacaaaggacgccaacatctttcgaacaggatgaggcactaagcttctctgcaacattgtcataaagatgtcatcttccacgcttcccatcataatatcagcaggtgcaccttagaaaagactcactggggaaatctgtaagcaatatcatgcaaaaatccttctccacatttctatttcctcacccatgaagcaaagaagaaaaattcctgacccgtgtccccaagttggtggtggtcaagaaatgatgacaactcatgctgctagtgcccagggatggcagctcacacatttgaccttccttgaaaatgtatgagtaactggaattctcaaccctggttttgaggccaggagtctagggcacagagaacttaagatattaccaaaaggcacatagcaattcatccacaggcagtctggtcttaaagtcaggattttcacggtacttcctctgcggtgaaagagggtgggagttctcaacaggagtgaaggcttctgagctcaaaagaacttctccaggtcagcagtgctttaagcaacccgtgttcctaatgggccctgaggaacccaagtaagacagtggcagggctcactggaaccaggtcaaggggaggtatgcacccactggtaaccaccaggatctgccgtcccccgaggtcgaaggtcagctccacctctttgcactctggtcagatgtaatggaaagacactacagacaccagcagagcccacatgagaacacggatgagtctcccagacagaaggtagagcaaaggcaacattcacagagagagcacatgagaagcggttgcccttaagtataagagcaggtgaaaccagctgcggaggcgtgagaggtttattcatgttctagtcctgaatctcggtgctagttacatgggggggctctgtttatttagctgggtccttacaatcagtgtgtttttccatatgaacataccctttcacacttcaaaataaatatctgacaaaaatgagccacaacggcctcgcgcgatggctcgtgcctgtaatctcagcactttgggaggctgaggcaggcagatcacaagctctggagttcaagaccagcctggctgatatggtgaaaccccatctctactaaaaatacaaaaattagccgcaggcggtggcacacacctgtaatcccagctactcaggtggctgaggcaggagaatctcttaaacctggcaggtggaggttgcagtgagccaagatcgtgccactgcactccagcctgggcgacagagcaagactttgtctaaaaaaaaaaaaaaaaaaaaaaaaaaatgaaatgaaatgaaataaaattaaatgagccacaacttctgggtggaagcaactatgctggcgttcagaggtgcccgctggcatttgctgggaacaccagtcagggccagatttgaatccctaaaataaataaataggtagagacaccaaatgcttccccccaccttggctttcacgggatggactcaacctgcctccttagaagatgcacagacaaatttcagaacaaagaaagcacgggtggaggctgggtgcatattttaagtatcacacagtacaagctgcctgcctcagttgaaattaaataatattcatgtgattggttgatgtccctctgtgagcatggggcagctgggccagagactggtgtgcaccatccggggacatagcaggtgctctagaaacagccaaagaaggaggaggtggataaaggaggattggcccccatggcgccggcagctcctaccctgtgcctggtgttctcccacctcactccctctctctgcctctccctctgtctctgtctgtctctctctctgacactctctgtcttcctatctctttctctgtttgtctatgtctttctgtgtttctgtctgtttttgtcattgtctctttgtttcttgtctctgtgtgtgtgtgtgtctctctatctctcactgtgtctgtctccgtgtatatggctatctctgtctctctgtctctgtctctgtgcttggctgtctctgtctctcggtctgtctgtctgtctgtctctgtctctctatctctgtttctttgtctctctgtttcattgtgtctgtctgcctgtctctctgtgtctgtctctctgtctctgtccctctttctgtctctgtttctctttttctttgtctctctgtctttctcactgtgtctgttggtctctctttctttcacatgggtgtacacccacccttacccacagcctcaggtcacagaggcactaagggattctgtccctcaggctctccaggtgtcttggccataagaaacccaggtgagtctctcagaacagccaggattcagcacacagaagacaatgcttcaagcccttgcccaaggccagacccccaagcacagcaggcatgggccttgcttcagatgacgctgaccttctgggcatccctgaagccccagggacctcagatcccactgtgcaatggggctgcagtggtcaccacgttctttatgtagagctcagacttccggctccatagccacaatcgtggccgcccatctgagcgtatctacagctctagagttcaccaacaccaggttagcaatttccccacatctcatctgaaacctacaagggctgtgcttagcaaagcaatggcagggatgtcactggcactcattgcaagggggaatctgggcatgcccacttctcctgcctcatcgtcgtacccccccatctgctttgagatctgctcctgcagctgtgaccttctgctcccttcttgcaacccctgcaaaaggcagcacttcaccatggctggagggagggctgaggaggcctcagagggtcagcccgactcccagaaacactgaggtcagtagcagcctgccccgccccagccagcagacccctctgcttcctctcccctctgcagtttgcctgttgctacctggattcctggaccctcccgcccccctcagcacccctgtgatcgggtgctccactgcaggatggccaagtttatatgctgtcaggcactttatatcccctataactctgcctcccaagccctcctgtgcatgtgtttaatttttacaatcaggaagaaggatggggagagtgacagcccagacaccttggaggggtgggctccggccctgcctcggaggaacctgcacatgaattccatcagtgaccctaggttgtattttatgcctaacaccccagtggtttttaaatctccttaaacttttgatgactgagataaaggaaaaggaggaggttgtgtaaatatggagccactattggggaagagctgccgggacctcggtagggcaggagtggaggccaccaggtatcggtaatggagccttgcttctagctcccttgctgctcacctgccatgccaacactccctccaccttccagtgggcagaacagtgggagaactcaactaccccacaccgtgatctttccgagacacaccctacctaggatgatggtgatgatgatgacgaccacaaaaagaaggaacacttttttttttattaaatgagaatgaacacatcttttaacatgctggtttttattgatcatcactcacagtctagtaaaaacagtgcccttgttatgcaaatacagctctaaaccgagtccccccagtgccacttccagctggatggcagctcaaaacccctcctgcaagatagttctgcagccacaacaccagagcaattgtctaaaacggcaaatctgcttgtatccctcccctgtgccaaacaacatctccccatcaccctcagtctatactctgtgtccaccctgcctagctccccaccttccaataaaacaacagcagtaactgtaacaggagccaatacttagtgactgattgcgtgctaggtattttacagggattatactgttttctccccataacagtccaataagggaggtacttttattttgctcatttcacaaaccacagggaggaggagaaggctgcctacggtcacactgctggccagtcctgtcctccaggaagccatcccagagggccctagggtatgggctgagtgatgtgaccaacttacactgtgcccacagcattccaggcttttctcttatcacagagatatgttgtagtttaaggtcagcttgtccatattcctccatgggagggagacagatacaccatctgagtcattcttgtgcccccaagacccagaacttggcacacgggagacatccagaaagcttttgaatgcacccatgttggacttaagccaccaggcctttattagctcaggtgggctctagggtgcctctcctggccctgtgagctgttgggctggaccccacaaccagggaggagggtccttggtgatggggattggccttcctctcccccttcctccctacttcatgaagtcttgttcatgcacaccatcaaggtgcttgttaaagcaggacatcacttggggaccctttgtatccattggattccctcgaattccttggccccaggagtaaagtttaaaactgattctgcaaaaggatagccccagttgggcttccgggtgaaacaagtgtaccagacaataaacactttattcccataagaggaggagaggccggagggcccgcaaataccagcgagcttccatgcagacccaggactccaacgaagacggcagatggacccagacagagctgaagcaggactgatagcaatcaataccatccaacttaatttaattcatttgccttgtattgaatatgatcttaatatactaggagacatcagcttctattagagcccaggaaatcatctttgaaaagaggcaaaatggtatcaaatgcataatttgaaaaacattgttttcaacatctttccacttcatttagcattttgaggaattgaggctatatcttgtaactatcaaactgaattaatcaccttgagacctgatagaagataactggaactctaatttcaggctgcttttattcttggaagatagccttttaagtgggaatatgggaattagtgcaaaatcgcttccactgtgcgtaggctgccacactacaatttttcagtagactacagcttgctattaaatatgatagtcactgactacaggtggctactgaacccctggaatgtggtgttctaaactgagacataaaatacacatggatttcaaagacttagttaaaaaactgtgaaatatctaaataatttttataataactacaagttgaaatggcaaatatttttgtatttgtgggactaaataaaatatgtgtgttcactttaattttcacaagtcatttcacctgatttttttcacttatttgttcatctcccagaaaattaaaaattctatatgtggctctcattatatttctgttagacaatgctagtctacacaatgaaatattgtggatgtgtgcccagagtttttttttctttgaaatagtgtatttcctaagaatgcatttacattaagttgtgccaatactgatgtatttgattgtgtttctttattttgattggaatagatagatttatacatagaagaatataatttggaatttggatctctaaaactgtgcccagagtttttaaatgacctgtaaaaatatataggatgtaattttacatgaaagaggcaaggaaatatgtatgtagaggataattaaaaccatgtaaaacatacggatatgtttacatatatgtagacaagaaaagacagaaaggaaattcagctagaatagacatctcagaatgggtggaatgacagttgattataatgatctcttttatgcatttctacacattcctgagagagatttttttgcatttattattaaataaaaataaacattatttttacaaaaatattttccacaaaattagtattgttatgtgtatttttctctgtcttgcttggtatttgctaaagtaaataatttacaatcacacttagattttatttaacccccagtggcatctcgtcacaaaatacaccatttttatgaagaactcattctcgtggaagtccactttttagttagatcacaaaacattttatttaaattaatgttctagtcagcaacagatgatttggtaaaaaaaaaaaaaaaaaaaaaaaaaaattggtgggtggtcactattacaatattacattggaaagagaaattttattatcaaagcttgctcatccaaaattcatttttaatgggctttttgcctgaacaaaaagagaaaaaagagatcctggaaaatatctcatggatttctaacagttagtcttttatatgggctacatttgaagaaataataagaattttctgacctagagaagcacaaatgagaaaatggttctggcctgatcttttcccaatttggttgaccctcaagaagccctgttgcaatgacctccacctggaaaacttgaactccttctgggttgcacaggcccacctgccaatgcatttatccatttatccatccacccatccatccattcatccatctacccatccatccattcatctgtctgtctactcatctgcttgtctgtccaagctcttaggcctgttggaggaacaaggagtccagtgtggctgcaagaggcagtagataaggtcagaaaagtaggcagaacttcacttagatcttataggtggtaaggaatttggactaatctcaatggaaaggtactggacaggttcaagcaggggcgctgatggcatctaatttccgcactgcaacaccactctggctgctgtgtggacaaggaactctatggggatgagaaggaaggcaggaaaccatttaggagactacttcactcatccatgtgagagaagagggcagcctggatgagtcatcactccagaacagacatctctcaggttccactcagggtacacaggctcactcatggctggcattggtttatagccccttctaacacagtgatgtgggaagggcaccccggaatacaacatcatctgcctgaatccttaaaatatttaagcatcccaaatcaccctctaagcaaaaagtcttctttaggttcccagaggttcaattctatgcagtttcgctgcttttcatttacctcgaatggtcccagctggatctggaaacagatgtgtcaacacaatccctactcatgaacgcttcccagccaccgggaaacaggtcatcaattgtaatctccatggaaaacctgattctgtcagagctttgcaaaccccacaggcctgggctatatcagggagcaagttcctgctggcagtaagaacaccagacttccccaaactggaccgactgacactggagagagggtgaacttccccagttctctgaagtcctggcacacttcctgtgctgttaaatcatccccgggtaaacctgaccttccagaatctgtgaaagctagctacttcatgatgaaccacctttctgagtttatcaaccactgttacttttctggctcctacccagccccatctggggagcaatgcagacccagcaatcctggcttctggaagcatttgtcttaaaagagccaatttcctcttgatgtccatgatcagctcagcttccagccaacagaccagatattctctcccatgacccagacccacaggatgctacctgcagtacatgtgaagtgtccctactatgggccactgtcctggaggcatccgcagacctgtccaccattctggccctatggggaaaatgggtggatgccaacacattgagatcatttgcaagtgcacagatacccatgcacacacacattgcttggccagaagttagtttaaggaactggacctctgggaagagtgtggcttgggcagggatattggctgtttacagacagctgctatatgctcagctatgctctgggctgcatcagttggggctgcagaaagacaacagcatagtcctcaactgctgataatttgatgtagagttggggaggttgtcagagggttgacagatagtggagtccatagactatgaagacaaagtggaattcactctggaatttacccactgaggagaccgcccttggagctctgtcctctctgggtaatgatcctgcacaacaccctccacttcaggagctttgtttttcccgcattctttcaatggaaacaatggcttagaggagttctggaacttcctaggtacaatggaattccatcacacatagagtgaggctctagactcaaaaatcctgctgagcctgggcacagaggctcatgcctgtaatcccaaaactttgggaggctgaggcaggctgattgcttgagtccaggagttcgagaccagcctgagcaacatggcgaaaccccatctctaccaaaaatacaaaaaattggccaggcatggtggcatgctcctagtcccagctacttgggaggctgaggtgggaagattgcttgagcttgggaggcggaggttgcagtgagcccaaatcataccatttcattccagcctgggcgacagagcaagaccctgtctcaaaacaaaaacaaaaacaaaaacaaattctgctgagacatgactgctgctgaaaaccacccaaagtgcagcagaaatgattttgtgtagtcagtcttccctaaaagacttcacttgtacaacatggacaggatagattaagagcacatatgcaaaatatgaacccattgtactatgtaaattactcccttttctgacaaccatgtatattttaatttataaatacccatgcattgaagaaacatgaccaactatatagcatttctacaagttgatcaggctcaaaccccatgacccagtttcaaaacgatctagctggaaatttccagcaggaaattattttcttatagtaacttcagaaacattgaacgggcctgaaagtgccctgcctgcctgtccacagtagcaaagctacaaaaaaagcatgcagagagcccctgaatcccgcaccagagacaggatctttaccccccacagtagagaggagaagccaacctgagaacgcaattcggttttttgtttgtttgtttgtttgtttgtttgtttttgagatggagtctcactctgtcacccaagctggaatgcagtggcttgatctcgacacactgcaacctctgcctctggggttcaagtgattttcctgcctcagcctcccgagtagctgggattacaggagcacaccaccacgcccagctaatttttatatttttagtagagtcaggttttcaccaagttagccaggccagtcttgaactcctgacctcaggtgatccacctgctatggcctcccaaagtgctgggattacaggcatcagccacaggggaacgcagttttctatgttaataaactactctgccaccctctgagtgctgtgtcctgagcacattccctcttcttaacgtagttgaggaggtctagaatccttcttttggagtacaggacacatttccgtataactgactccctgactccctgaaacttcttcctgaaggagagttgggctacaaggactccttctcctaaagccagctcctgagagtccaaaacctctaaaaatttctcatccttaccgggtttccttcaagacaccttcagcttaggcttcaggtccaccctgtgacaactttgcactctttttgtcctgccttggggcattgggacctgaaaggcattttctagagccttgttgaagaaggaattgcaagtcaaagctctgacccaagacaaaacccagagatgggtacagcagattcaagcaagttccagcccattcctcagcatggactcattaggcacccacatgtgcggggtcggaggaggtttcaggacaagggtccccctgcgtgaatggagcgacgcctttgacattggcgtccttcctgatggacttggccttggctgctctccatctctagtaggccagggtgggtggaggggcctccctgggacatcacagcccctccccgctgaggagaccacccttggagctctgtcctccctctgtaatgggcctgcctctccctgccaaggttttaaaagcatctgggcacaggtgcgggtgctgccagcctccagggctaataagaggaaactcggcagaggaaaatgaggccgcgtagccacaatgccattatgttttcccagaacgtgcaatgctcccaaataaatgtgtctccagcattatcacaccacaatattcatacggctcattactggttttaattttgcccgttgcttatttactgtctccttccccactttattgccggggtggaagagttattcatccaagcccagcacagaagggccccaaagcggaatttctccagaagccgctggcccagcgctcaggcctcgcaggctccagctcaaacccacacagcatcagaggttcccctaggcggcccttcctgcagctccctgccacgttgactgactgcttttcctgcctggggaatgagccctttctcctttctatgaccaaaagctgtgcggccacctgctacgctggatagatgagcccatgacaccacccagtgattgcctgtgtagtgtgaggtcgatgacacccacacgggccccttcacgtaggcaagccgctgtcatgtgccctctgcaacctgggactcctgcctgctctgctgtgatacagggctagtgcccttcctccctaggcatggctcaggtcccagaagccacactcgtcacaggtggaaggatggcagtgttctctgagctgcatggggaactgagtgtggcattccatccctggagacacctccagaaaggtaaaacccttgaaggaaaggatgcacacaatgacttcataaacatacttttagaaaaaattggaattaatgctttttaactcaaatttgacaagcacagaatggtataaagaagcaaatcactatacctctctgctcatcaacagaaaactcttaaattttggggcttttatatttgatcttcttttacctgtactaaaaaaaaagaaagaaagaaaagaaaaaaaagaaaacaacagaattcagaacataatcttgtcctagaatctcttttttattaaatccctcttccaaaattatgaagtcggcctgtgttttctacaaccagtgttgaaaaacagtgttattagcatgtactatccccttccattatcgtatttttgtccgtaagcgatatattagcataacgaatgttggagagggaaggaaggaaggaaggaaggaaggaaggaaggaaggaaggaaggaaggaaggaaggaaggaatacagtaaagaaggaagaaaagaaacaagaaggaagataaaaagtaaggagagaaggaaggagggagaaaaggaggaagataagaaggaagaatgaaaggcagacaggaaaacagaatgaaggacaggagggagggaggaaggaaagaagggagaaatatttaacaaaagttatatagaaaaacaaaagaaacaaaaaggtttcaaagaaaataaaagacacaacaaaaataggccttcactctcatacatatatcatacgttttcatttctctgtaacttttttcctctcagtgaattatcatggtcatccctttgcgaaaaacagatacaaagcactttcttctctctctctctctctctctcactgcatagtattctttagtcttgacatgctcaatgtattcaatcattctcgtacttatgaacattcagaagatttcttctccctccttcctttaaaaataatgcttttatttccataagttacagccataaagtagaattgctgggttaaaggacatgcatactttaatttcaataaatactctaagactacattcccaaaaggctgaagcaagtcaccatcccactggcaatatatgaagcgcctatatcctggcatctttgtcagcatttaatattatcattcgtatatttttgtcaacttgatggtaaaacgtgttatttcagttttactgtaatttttactttcccattcacaaaggttgagtatgttctcaaaagtttattgacccatttggattttcttttcttgtgaattgtctattgatagtttttgcaaggtttgaaattgggtaacatgtctttttcttcttttgatttgtaaatactctttgcatatgatgcatattaactgttcatctgtcaggcgttgtaaatatttttctcattctgtttaacattatgtcacacacaatttcccacatctgtcaagcctcattgtaaacatgtttaatgcctgcaaaatattcccaagtgggaggatatcgattcaccatcctctagctattgttggacacttagaagtttcttgctctctttatggttttatgaacgattttgtgggaacctctgagcttaaatcttgcccacgttttgtgttatttctataatgcaatttagtacattttgaaaatagttttatttgtaaaagtaaagtcattaaatcaaaaatataagcatttaaaagctgttgatgcatattgtgaaattgcttcttaattgactatttattcttcccctaactccacactcagtctcctttgctggcactgggaattgcatttcttaaaaatgtatgccattgatggcttgaaagagtatcataatattgttttaattgttatccttttttttacctttgaagatcttgatttttaatgtatatgaattctatatgtttgtaggttaaaaatccttagttatatttgtaggaaaaatattcctggttatgatttcaacttatgactttattgacagataagatatttacatcttatagagtcaaatccattggtccactgtaatttttttcataatgttaagcttagtcctctgctagccaagagatcatttcaatatgcactgatgttttctagtttgttgtgtttcaatttctatttgacatttaacattttaatctgttttatctcattttggggtatggtgcaaatataaaatctgcttctttaacctaggtagttttccatcaaattcagtgccatttggaaaatactccttaaatatcaatcccttctaacgaaattgttttggagctctctggtctgcattttagatttgtatacttcttttagtattagtatctaattaatttaaggatttttgcatcataatacattttatctggctttgcaaattctccttcctccaattaatttttggtttaattttattaactggtgcttgtccatctaatttctcctaggtataatttagaaatattttgttccttgcccccacccccacaaaaaaatccttcccacacttcgattaagattacattgaacctcaatctaacttgaagataatttagacattcagtcccctcatttggctgtagctatatttatagctgtctttaactgaaaggtttttttttaatctttatcgttattcgtttctattttcttcaactacattctacaccagtcttctgaaaactttttctgggccaggcgcggtagctcatgactataatcccagcactttgggaggctgaggcagtcagatcacctgaggtcaggagtttgagaccaccttgacaaacatggtgaaaccctgtctctactaaaaaatacaaaaattagccgggcatagtggcgcatacctgcaaccctaactacttaggaggctgaggcaagagcatctcttgaacccaggaggtggaagttgcagtgaggtgagaccatgccactgtactccagcctgggtaacagaacgagactctgtgtcaaaaaaaaaaaaaaggaagaaaaaaagaaaggaaggaagaagggaaggaacaaaggaaggaagaagaaaaagaaaagaaaaactttttctggatgcttatatttgtgatttttaaaattgattattggtggcctggtgtggtggcttacgcctgtaatcccagcactttgggaggcctaggtgggtggatcacaaggtcaagagattgagacaatcctggccaacatggtgataccccgtctctactaaaaatacaaaaattagctgggtgtgatggtgcgtgcctatagtcccagctactagggaggctgaggcaggagaattgcttgaacctgggaggtggaggttgcagtgagctgagatcatgccactccagcctggcaacaaagcgatactctgtctcaaaaaaaaaaaattgattatctgctattaggttaaaaaaggaacttctgcatgtctgttaagagtataattatcatataattataattatagagcattggtgatcacattgatttcattggtgtcgaaaatactaaaattattagtccaattaataatacaattataaataacatcagtaacagtaaaactgtcaccacatctgagattcttttaaaaatagtgttttgcatattcttctaagatgccacagaagtttgtggttagtttttgatttaaaagccttgactcttgacctattaaataggtgaacactttgccagggttttaaattaggaaactttcaaattaggaaccaaatttttctaagactgtagagatttctagtcctctttaaattttctcagaaagagatttctgtgctcattgctgacagaagttgtcacttcactgacgtcatcggtggaattgaggacgaatgtaacactttgtgatctgatggtttccctggacacatttcagccctacaagttgagagaaagtgagtgcccacagtcaggggaggcgcctggtggctgcagccagccttcgtgtgcacaggcgtggagaagacgtcctctccaatgggtaggggaataaagatcgcagttaacagaatcacatagccagcactgcctgagtgctgatcgtgaccagccaatgctctaagggcgtggtgtgcaccatccctgtaatccttttccagctttattgaggtttaatagacaaatagaaattctgtatatttaagatgtatctctgatgttaatataaatatacaatgtgaaatcaccaccacaatcaagataattagcatatctatcacctcacatagttactcttttcctactttattttttttatttgtggtaagaacatttaagatctatatatctacgttgtgcacaatagccaagatatgaaaacaacctaaatgtccatcgatgcatgactggataaagaaattgcaatatatacatacatacatatgtacacacacacacacaatggaatattatgcagctgtttaaaagaaggaaatcctgccatttgcaagaacatagatgtaactggaggacattatgctaagtgaagcaagctagacacagaaagacaaatgttgcatgatttttcttatatgtgaaaactaaaaaaacaaacaaacaaacaaaaaatgttgaatgcatagaaccagagctggggagacgtaggtcaaagggtataaagctgcagtgatgtacgacgaataaatctagatgtctaaatacagcatgaaggctatagttaacaatactctactgtattgaaaactaagacagtagcttttgggtgctcttaccacaaaaaaaggtcaccatgcgagatgatatgtatattaattggcttcactgtagtaaccatctcattaagcaagcatatatcagacatcaccttaagtatacacaattttaaaaaaaaagaagaggagcttgaagcttgctaaggttttgtctgcctaggtacacacaaaacagtaagagacaaatagcaggacttgacactagccactctgcagtctccctcaaaagacacattgcctagttctttttcattttgttgtggatatatatatacacacacatatatatgtgtgcatatatatgtgtgtgtgtagatatatatagatgtgtgtgtagatatatataggtgtgtgtgtatatatgtgtgtgtgtagatatatataggggtgtgtgtatgtagatatatataggggtgtgtgtatatatgtgtgtgtgtagatatatgtaggtgtgtgtgtatatatgtgtgtgtagatatatataggtgtgtgtgtagatatatgtgtgtagatatatatagggctgtgtttgtatgtgtgtgtagatatatataggtgtgtgtgtatatatatatgtgtgtgtaaatatataggtgtgtgtatatatgtgtgtgtgtagatatataggtgtgtgtatacatatatgtgtgtgtatatataggtgtgtgtatatatatgtgtgtgtatatataggtgtgtgtatatatgtgtgtatatatatagatgtgtgtatatatgtgtgtgtgtgtagatatatgtaggtgtgtgtatatatgtgtgtgtgtagatatataggtgtgtgtatatgtgtgtgtgtagatatatataggtgtgtgtatatgtatatatagatatctagatatatgtatctataaatatagatatatataggtgtgtgtatatgtgtgtgtagatatatataggtgtgtgtatatatgtgtgtgtagatatataggtgtgtatatatgtgtgtgtagatatatataggtgtgtgtagatatatataggtgtgtgtagatatatataggtgtgtgtatatatgcgtgtgtagatatatataggtatgcacatatatgtgtgtgtagattatacaggtgtgtgtatatatgtgtgtgtgtatatgtgtgtgtgtgtatatatctattaccaagttatccatgtctacatgctctgttctgtggcattaagcacattcacattgtatacagccatcaccaccatctatatctatgtccagggttttttcatcttcccaaattgaaactccataaccagtaaacaataacttctcatctccgactctacctggcccatggtaaccaccattgtcctttctgtctctatgaatttggctactctatggacatcccataaatggaatcatacatctcataaatggaatacaatcataccttgttcatttgtatctggcttgtttcacttaatatcttcaagagccatccatgtttttgtcagaatgtccttcctctttaaggcagaatcgtatgtcattgtatgtctaccccacattttgcttatctattcatccactggtggacgtctgggctgcttccaccctttggctattgtgccacgcctagttcttgtccatgcgttggcctgatgcttgggagccaacctggtttcttggcagcctctgttccttgtccccacttggcaacatggcatggcccatgcggggaagagctgcgcgatatggggagaagcaaagggtaaaggattccatgcaacaatcactagaggcgcactgatttgttgccaaacagtgtgctaggcccagtagaaccatggagaaagacaaggcaccatttacaggctagtaagatgcgcaaactccagaccataattcaagaaaaaacaaacaaacaaaaaacgctgctgttgaggcactggagagagatggtttaattccacattggagagggttgagtcagaggggcttcatgcaagggtggatcttgatgggagcttgaatgccgattgggatttaataaatagaaatggagggaagagtatttgcctaaaggagactatatgagcaaaaccacaaaactcaaacgtggagaaggtgaagatacgagttcggaggagcacagtagtcctgtttcgttgcgcaggagcacagtcaacttctaacgtcaattacgacctgaacttgggaacttgttaaaaatagcagtcctccccacttcgttcctctttctcttagataaaaccaagtctgcatctattgagaataaaggcagtaggtcagatgaagaagctgtgtctgggaaattatctcgtgaattcaagcaattagagaggaggagaggtggtaaacttctgtaaagctgttttgcaaactaagtcagacattcaagaaagcaggttaatggtgcatccagtgacaacgatgtcagggtatatatagatctatacctgcccgagctcactacagaatattgtcacactctagtggacagcatgttcatgtctgctcagcatctatttccctgtgtttggtaatgccccttggattatccctgtgctttaggtaaggctaatcctacctcactggctcgtagccacaggttatgggttcagggatgaacacgttgatcccggcagggccagtgggactcaagccaagaacttccgttgcaaacgaatgaaaaagataagctgcttttccgtggatttgccaagcttatggaagacaagcttggagctgctgaaggtcaacttgcagaggctactcatgaagaaagccaagaatcagagagagacaggctcctggatccagtcatgcctgaagacacagccctggatgtatcagttatgtaacaaaatataataactcgcaaaattcgtttgtctatctttttatgctggtcagggtatgttttctgtgacagaaggagtcctaattatatatatctattccctgcagaagtatcctttcaaattctatgagcagagccaaggcacaggacagaattggctgcatcagcccaaaagattactcagccaggtatatcagaagcagaattctgatgaaatatgtatgcagataattttaaaatattttttatatatgaatctattttagtctgaatactctcaaggtgtgtacacagtttgagttcaccagataatgtaccaaatccagcttcttcagctgatccactgcttctgttctcaacagacacagactttaatctcatgtaaggggaagaggaggaagtggaaagtacactatctttcagcaagtccccaagccaaggtcacactcacctaagaagttaatcactcattctgcagttaataaatcaccttctgcaaaattttggtaaaagtgtggtttatttaacatatataatagaaattaagaaataaaattatctttatttgcaggtaacataattgtctacatagaaaatctaaggaatatacaaagaagctactagaagtaataagtgagtttaacaatgtcacagaatatatcaataaacaaaataacaactgtatttacatattgtagcaacaaataattggaaattaaagctttataatataatttattgtactaacaatatcaaatatacataaagataaatttaacaaaatatgtgtgggactagtaaacagaaattacaaaacattgcaaaaaaaagacctgacaaaaaatatatactatcttcatagacttattatttttaacttgttagttctccccgagttaagttacaggtttaaaacaatatcaattaaaattctagcaagctttttaaattaatgtaaattgacaaagtgattctaaaatttacttgtgaaggcaaaggccctagaaaagccagaacaattttataaagaacaagtttagaagtgtaagaataccttatctcaaggtttaatacaaagtaacagtaaacattatggtgtggcaggggcaaaggaatagctgtatagatcaataaaacagaaaagaatgtccagatatagcagacccatacatatgtggtcaatttattcttgacaaaagagccaacgtgatttatggggaaagaataatctctcaacaaatgacaattaaacaattggatatgtatatgggggaaaaaatcacaaccctaaaagaacttgaagtggatgatgtacctaagtgtacaaactaaaattaaaaaacttctagaaaaaaaaaaaaagataagtataaaccattgtgaccttgggttaggcaaagaattttaagatacaaaatgtgcaaatcaaaagaaaatattggggcctggtgtggtgtctcacgcctataatcccagcacttttgaaggccaaggtggaaggattgctgcagcccaggagttggagaccagcctaggaaacatagtgagataccatctgtacaaaaaaagggaaaatattgataaaatggatttcatcaaagttaaatactttcaactcttcaaaatatataattttaaaaatgaaaaggcaagtcactggcaaggagaaaatatttccaatatgcaatataagtcttgtggtccagcatggtggctcatacctataataccagcactttgggaggccaaggcaggaagatggcttgaggccaggagtttgagaccaggatgggcaacatagcaagatcctgtctctaaaaaaaaattaaacaaaaaaaagaacttgtatccagaatatgtaaagagctcttagatctcaatgataagaagacaaacaatccaatgaaaaataggcaaaagattgggacaggtacttcccaaagaagatatacgaatggccaataagcacagagaaaaaagcccaacatcgttagtcaacagacaaaggcaaattaaagccacaatgatgtatcacttggcaaaaattaataagactaaaactacaggcataggcaacaaaaaaagcatcaaattagacttcatgaaaactaaaacatttcgtgcatgaaaagaaactatcaacagagtaaagagagatgtgacattgtaagatgtatatttggtctttgacacaatttcctgatacacaacttctaagatccttagaatctcaaaagtgatggtctttttgtatgctaatgattgactggtggctgggggtccctaggaagcttcaggatgggggctggtcactggaaaaaccaaagacaggattagaggagggttaggactttcagtcccacccacattatccagagaggggagaggtgtcgaaggtttgagttggtcacaatggccaatggtcagtggtttaatcaatgcctgtgtattgaagcctccagagaaacccaaaaggacagggatcagggggcttccagttagtggaacacctggaggtttctggaaggtggcatgaccagggaaggcatagaatctctgcacctcttcccctacatcttgccctacacatcttttcatctgcacactttgcaatatcctttacaaaaaataggtaaaagtttccctgatttttgtgagccactctagaaaattagttaaccccaaagaggaagtcatgggagcctcaacttgaatgccatcagtcagaagtttcagaggtccggacttaacaactcgtatctgaagaggaggtagtcttgtgggactgagcctgtgggatctgatgccgtctccaggtcgacggcattggaattgaattagagaacacccagctgtgtccactgcagaatggattgcttgtttggtgtgtggggaaaaacttccacatatttgatgacagaagacttctgtgttgattgatatagggggagagcagaggaagaaacagcttgaggttttctcccctcaaaaggcaatccacataatgggagaaaatacttgcaaattatatatctgataaaagattagtatccctattccacagagaacttctaaaactcaacagcaaaaaccaacctgattaaaaaataagcaaaggaattgaaaaggcatttctccaatgaagatatactaatggccaataagtacatgaaaagatgctcaatatcactaatcattagggaaaggcaaatcaaactacaataagataccaactcacacctgttaggagggatactattaatataacagaaaataagtactggcgaagatgagaaaatggaattcttgtgcactgttcttgggaatgcgaaatggtttagccaatgtggaaaacagtatggtagttcttcaaaagactaaatacagaattaccctattcagattcaacgattccgtttctgagtatataacccaaaagacttgagagcagggtcttaaagagatatttttgcacacccatgtttcgagcagcattattcacaatagctaaaacatgacagcaacccacagtcattgatgaatgaatggataagcaaaatgtggtttatgcctacaatgacttattattcagccttttataaaaggacatctgacacatactacaacatggatgaaccttgagggagttatactaagtgaaataaaccagtcacaaaaagaaaaatactgtataatttcacttcataaggcagaatagtcaaaatcttagaaacagaaggtaaaatggtaattgctggggctggggaaggtgggaatagggagtcgctgtttaataggtacagagtttcagttttgagaaattaaaagagttctcgagatgattggtggtgatggctgcacaaccatatgaatgtgcttagtactactgaatcgtgcacttaaaaatggttaagatggtcaatgttatgttatgaatatttttccacaatgtttgattgaaaatatcaaatgtaggagagaaaggggagtaactggaacccttatttgttgctggtgggatataaaacaatctatttggaaaacagtttcttacaaaattacacatatttgtccagtgtattgaattcagaatattttattgaatatatttacccagcatattaaacacatacctaacatttcccattaaaatgaagacatatgtccacacaaaaatgcttacacacatgtccatagaagctttatttgatggatcaaaatggaaacaacagaaatatccatcaataggtgaatggacaaattgtgttatatccatataatggaatatcactcaattaataaaactgaatgatcctcatgaatcttataatcattatttttggtgacacaaaaggttgcacattgtatgagtccgtttatagaacattctgagaacaaacaaaaagccagggacagtggtgaggagaagaattgaagcaggtggcatgaggacactttttgcagtggtgtgaatattcatatcgcgattgtgttggtggttacagaactgtatatattagtcaaaggccatagtgctcttcatccaaaaaggtgactttttggtacaaaaaagtatatgcaagaaatctgggttttaaaaagagtctcaaaacaagtatatagagaaaatttaaagttttttgggggaaaaatgcaaacctgtgtttctggattaaaaaaaactcaaagatgctcattgttttagtccattttgttgttcttagtccatgttgctataaaggaatacctgagactgggtaatgtacaaagaaaagaggtttctttggcccatggttccgcaggctgtacaaacatggccccagcatctgctcagcttttggtgaagcctcaggaagcttttactcaaggcagaaggtggagggggagcaggtgtgtcttatggtaagagaggaagcaagagagcaaggagcaggtgccaggctcctttaaacaaccagctctcatgtgaacacacagagcgagaactccctcatcatggcggggagagcaccaagccatccatcaggaatccgcccccaatgacctaacacctcccatcaggctccaccttcaacatcagaggtcacatttcaacaagaaatttggacgcacacacatctaagccatatcactaattctttccaaattaacgtattcgacttttgtgattctaaacaaatcttaacagaactttgtgggggacagatgaaacttgacaaaacgattctcaaatttacatgggaaagttaattgcttataatgccagagaaagttgagtaaaataaaataatgagggaaaactatttttttttactccacatacacccgtgtgtagtgatttccaacctgggttatgtgtgcatgtgtgtgtgtgtgtaaatgtgtgtgtgcacataggtgtgtacatttattttgttgtgggcaacagtcacagtttgaagaaaggataaaatggtggttgctaagtcctattgttctttgtttttaaaaataatatagtttttaaattatgcagtaaatgatgaagagattcttttatgcatctgaaaagataaaaaaatgagcttaatttttttaaaagaaagccttctttacccaaagtaactgaattaaataacgggatgaatgtaatttttttacatgtcaggaaataaagtaaatatttacctaaacttgaaatgtaaactaattttaaagaatggtggcaaaaatatgatgcttttcaacctctattctttttgcttctctgcgcacagtgatgtgctcaggcgtcatgctaagcatttgggcagagggttccacaataaaagaagtttttcttttttttttaaatttgcctttctttctatatagaattcaacaatatataaaattataaagaaaaaagtaagaatcctctgaagtctcacacctttgaaataaccattaataacacttggaataagctttttattatagattttctttattcatagaaacatacatatgtgtaaactttgtaaaaatggaataatatcacacgtgctccatgctcaccctttctaacaacccacatatttcttcatactcctataattctatgaacacctatacacaaaattctccaaaattctatttgtatgtgtacatgcatttatatacatgtactctttggaagattttctattatttgatttacaggaatggaatatcttccattctttctgcattttaatttcttgcttaacaataccttatagcagctcctcaaagtcacagagtgtagctcgaatcccttctttgccctggctccatgccattccatactgaaggcatagtcctctctttttggccattttggttggtaagcatttgctctgttttcagttttggggccagtgcaaacgatgctacaataaacctctgtatgcctgtccttatggatttgttctttcagttccatggggtaatttcacaggagggcaattgtagggttggatggtagatatattttttaatgttgaaatgatgttgccagactgcattcccaaaaggttattttcaccagcaacctgtgacaatatctcctttcttcaagcctgtcaatattagtcaatagtacatatttttatttttgaatataaaatatcattattcatctaagtgacatttctttgaccactgttgaattaccttaaatgtcaaaacagtaaaacatttcaatatcaagaattatacagaaatattgacagtgactattggtagcatacatttttcttgaatgtcctaccatagcactgtctggtaaaaatttctgtgatgggccaggtgtggtggctcacacctgtaatcccagcattttgggaggccaaagcaggtggatcacctgaggtcgggggttcgagaccagcctggcaaatgtggcaaaaccctgtctctactcaaagtacaaaaattagccaggtgtggtggtgcacacctgtaatcaaagctactcgggaagctgaaggaggagaatagcttgaacctgggaggtgaaggttgcagtgagccaagatcgcacctctgcactccatactaagggacagaaggagactccatctcaaaaaacaaacaaacaaacagacaaacacatttctgcaatgatgggaatgttccatattctgtgttacccaatatgatagtcactagccacaggcaagtattgagcacttgaaatgtggctattgtgagggattgaatttttattttatttcatttaaattcaaatatccagatgtcccttgtggctactatattggatagtccagttctagaaaatacaagttaaaagattaaaacattgaaatatgcacttatcttttttctgatatatctaaaaatctcatgatattttattaagaaaaaaactactagaaataataagaacttttttcaggtaactacatataagctaaatatacaaaaatcaatagctcctttacttagtactaagcacttggaatataaattaggtaaaagttcatatacactaacaacaaaaatggcaaaatgctaaagaataaatttaatggaaaagctatataacatatccaacacaaattttaaattgtaataaaaagaataaaacaaaaccaaatacctagaaacgtatactatactcttggacaagaagatatattatcatatacatcaattcatctaaaattaacttataaattttatcaattctaactagatttccaagaggttaaaatgatccttgaattcatattgaagaatatacctaaaatgtactaaaaatatataagaataaagtgagtgaggcttaatttatgcactactgttatcttctcaagagccattgtagtaaagttaacatggtgtggacgtaagaagagacaaattggtttatggaaattaattaaaaatctagaatttgatcccagtatatgcaaagttaagagctgacaaatatagagttttacttaatgtgaaaaaatagaccatttaatgaataatgctggcaaaattcattatctttataaaataaaattttaaacttttattccattaccataggcaacaataaatttcaagataaaaggctcagataaaacaaaagaatcttatgataaaaatcagaagacactcatacaatccaggggtcaatgtagtcttcctaaataagaatagaaactcagattcttaaaaattaaagggaggttatatctctcttaatataaatttaaagcatttgtttgacaaaatacacagtaaacgaagtcaacacacaaatgatactgtagaaaataatctttgaaacaaggctaatctccacactgcataataaaaactcaagcaaactaatcagaagaaggcaaacaagccaatttcaaaaagaaaataaggaggaatcatgatgagaaaatttacaaatctaacccagaccctgaacaaaattagagaagatgtacaagtcccctcttgttgacgtcctcgactagctctgcctctcctttgtttctggtgttcgtctacagtttctaggaacataggagaaaaatcatcactgccacagcaacagaatgcagaggaacatatgataggtttcccattattcagattgacaactgcatgtcaaataatcaaaagcaaaagatcagacctgtaattccagtactttaggaggctgaggcaggaggatcgcttgaggacagaagttcaggaccagcctgggcaatatagcaagaccccatccccaaataaaaataaacaaaaattagctgagcatggtggtgcatacctgtagtcccagctactcaggaggctgaggtgagaggatggcttgaggctaggagttggaggttgcagtgatccgtgtgcatgacactgccctgcagcctgggtgacagagcaagagcctgtctcaaaaaaaaaaagaaaaaagaaaaagcaagtcgcttgtttcggatacgcccactgagcagacacaccgccttcaccaggtatttttaattctgtgggccagataaggagggtgaacaccatcttacagcttacaccagagccagatcccctaaatctactacagatgctgcggtctcagagccttggtaaactgggcttcaaaggggcctaaggacctgtcttcctcaacccttgcttggacctgcttgaactccttccctcagcctccctgatgggtgattgtccaacgtccatttgatcatcagccccaattagtaaggaactcactctccccgacaatgtaagaagaaaggctttctcattctgaacccacaattgcttccctccaagttctgtgttctcagacccccaaatctcccagggggttcctgtcatctgcacagcagggatgctttattctatgggaatctttgagcaagtctgaccagtgggataaacgcacgtttggcctcgccttggacagatggccgtggtgagtttccgtaacatgccaacacctcacctgatcctcagaggtggccatctctgggtctcactcagctcctgaactatccaggtcaccacactcacctaagacaaggtagaaaaatcaacttctaagccccaacttagatgcgcttcatcagcgtccctgggctcatcggtccggcgttcgtatttcaaaatgctcccaggtgattctgaccctcagctggttttgaaaagccctagctcagaggagctcaaacccaggcatcttcagaaaactaccaacacactttgattaggattggaaatcccaactttctggctaccgatagtgttaaactgctgatgtttcccatggccctttcttgtttgtaaattacgttctccaaaaccgaatttgagagtcataacagctcatcaagggatgcttcttacctatgaagacagtgagtcactgagccctactgggtgtaacagtttcaggacaccatatgtgcaaatcagccactttctttctctagaacttaacttactcctaccttgaacctaagttctgagtcaacagtcagttccatttttttttttttttttagatggagtttcactcttgttgcccaggctagagtacaatagcgtgatcttggctcactgcaacctcagcctcccaggttcaagcgattctcccgcctcagcatcctgagtagctgggattacaggcgccctccaccacacccggctaattttttgtattttgagtagagatggggtttcagcatgttggccaggctggtctcgaactcccagcctcaggtgattacccacctcagcctcccaaagtgctgggattacaggtgtgagccactgcgcctggccagtcagttcaaatttaaactcagcccattccgatgtctcctctctgtcctccaaccatatgggtggaggaagacaaagcagttttgagctttggtcagcctctgtccatgcacatctgctgagctgagcatgggtcttttctgttctttgctgatatccagttcactaatggatcagcagagatgtgtatacctcccctatggtgcctgacccctggtccttggtgtgctcttgagcacccaccaggatcaggaggccccacaggaaggccagcccacccccacctattctgtaagcacttcttagggctgtggaaaagcagctgcccctcacacctttaggggatggcaggagctgtgaggctcccctctgctgggatcaccttgctcccaggccagggtgtggagccacttggggcctcccacttcacagcttctccttgggaactgagacccagggattctgtgttctcagacccccaaatctcccaggggggtcacctgctcacagatacttaaccgaggagaaggagatggatgccctgtcccttccatgtggctttctctcagttcacccccttttctttggagtgagaagtgggcattggcacagcaaatattctttgcttatttttaggctaaaatgttaaccttcggaagctcaaaaggttaaaataaataataactgcatgtgtctccctttgaattcctgctctaggtgtattccttggggtaggggggagtaaaaagaccatggaaaatgaagaatagaagagattgctaagactagtggttttttttttaaaagaatatcagtagagtgactctagttaacaatactctgtggcatatcttaaaatagctagacaagaataattcaaatgttcccagcataaagaaaagataaatatttaaggtgatggataccccaattatcctgatttgatctttacacattacatgaatgtgtccaattatcacacatatcctgatattatggacatctattttatatcaataaaaataataatgaagtgaatgcttggcattactatccctcaacagggaaatgtttctaaggtctcggggtgagcaaatagcaaaatttgggccagaagtcagggcccccactagtgagccagaagtctgtgggctgtgtcctgtctgtaggaacttagacttcatctccatcttccccctggggaactcctccagagagaggcattgctgacccttcaaagcaccaaagataacaacaagtcttcttccccaagcaggtattccaggtgagtccggggtgtagaagactccctcgaacaaagggtgtcctctcctccttagctcacacaggctgcccaggatgaagactccgtgggagtttgggacctcgaatgggggcttgtttcagttctattgcatggtgaggcaggcttctcatcagagaccttccccctcccccagccgggagactgacaggcatcacaatactgcacgctgggccaggggacagtgagtgacagcactgcttcgagggacgattaattctgcacaaggaggtgttctctcctggctctgccactcacctactttccagcaccaccattgactgacagcgcatgttactcctgacctcacacatcactgggtataattgccgggggctcgttattgtcattaacgtctcctgcatgcacacgggagtgcctttcaccccaactcacgcatcacaatgaaggctgcacctgtggggtgccaaccacaggcctgcagtcctgggcttggcagggacttctggggccagactatggttgtccacagtggcggtgtccgacattccagcaggtctgtgatgcctgtcccactgccaggagtctaagagcctctagtgctgaagagtttgaagagcctacctttgcagtggacccttcttccaacacacaaccaacccagagccgacacacagcagcagctccttagcctgtcataacctgaaatgtgtatattcagaaaactaaagctcagagctccctagggattatctagtcctaatccttctatttcttttctccttttctttttttttttttcctttttttgagaaggagtctcgctctgtcatccaggctggagtgcagtggcacgatctcagctcactgcaacctctgcttccctggttcaagcaattctcctgcctcagcctcccaagtagctggcattacaggtgcccgccaccacgcccggctcatttttgtatttttagtagagatggggtttcaccatgttggtcaggctagtctctaactcctgacctcagataatccacctgccttggcctcccaaagtgctgggattacaggtgtgagccaccgtgcccagcccctaacccttatttttctagatgagaagattaagatccagagaaagctcttaaccagctcaagctcaccaacaattactgatgtggtgaggcaaaatgtgtttgtttgtttttttcctccataagtgcttaacctggatttgcgagtccccggatatattcactacacttaaattttcagtgtagtaatgaaatttttgagtgcttgctatgggccaggtactgtttcttttgttattgcttttatcgttttttaaaatgttgttttccagaaatggctgttgaatatttatttagttgttgctgttttaaaatgcatacaattgccagacacgattttaagtacttaacttttaaaaaatcatttcagtctctagataataattcgatgttaaggccgggcatggtggctcactcctgtaatctcagcactttaggaggctgaggtgggcagatcatgagggcaagagatcgagaccatcctggctaacacggtgaaatcccatctctactaaaaatacaaaaaattagccaagtgtggtggcgggcgcctgtagtcccagctactcaggaggctgaagtaggagaatagcatgaaccagggaggtggagcttgcattgagccaagatagcaccactgcactccagcctgggtgacagagcaagactctctcaagaaaataaataaataaataaaaataaaaataaaaataattctatgttatgcactattctcatttcatactattcatactagtttcctgccatgaaggaactgttcctatattcatctacattctcaaggatatgtgaaacccttgatatgatttttgaaggtgctacatatcaccttttcaaatgctaacctggaaattttctgtctcaaggagctaaaaactgttctccccacattacccacattttcaaattgaacaacacatttctaaatattccatgggtcaaagaggaagatctcaatgaaaattaaagattcataaaattgcaatattgtgagagaaatttatagcagtaaatgtttacattggaaaaaatgaaaagtctcaaatcaacaattgaagtccctatctcaagaaaatgaaaaaaaaagagcaaagtaaacacaaaaccagcaaaagaaagtaaaaaagatccaagaagaaaccaatgaaactgaaaacagaaaaacagcgaagagaaagcataaaacaaaacaactacttctttcaaaaaattattttaatgatcaacctctatcaagactgaccaaaataaaatgagcaaggacacaaaacgtgaatgtcagaaataaaatgggctattactacagatcctgcagccattaaaagggcaagaatagaatactatgaacaacttgactctcataaatttagcaacatagaagaaatggactgattcttcaaaaactgcaaaccacccaaactcaataaagatgaaatagataacccaattagccctataaacattaaataaattaaatttttaattacagatctctttttaaaaagttggtctcactagaaatttctactaaacttttaaagaataattaacaattttacacagtgtttttcagaaaacaaaaaaggaggaagcacttctaaacccattttgatcccctaaaccgcacaaatatggtacaaaataagaaaaactatactctctagctctcatgaacttagttgcaaaaatcctcaacaaaatattagcaaatcaattcaccaacataaaaaattaactagacaacacaaccaagttagatttatttcagatatgcaagattaattcaataatcaaaaattaatcaatgtaatccactgctatgatttggatatggtttatttgtccctaccataactcaagttgaaatttgatcccaaatgcagaggtgttggaaggtgggtcctagtgagaggggtttggatcctggggacagatccctcatgaatggcttggtgctattctcatggtagtgagtgagttctctgagactggattcattctcaaggaaatagattagctactgtgagagtgggttgttatacagccaagatgccctcaggctttgtcccttcacacatttccacttcctctttgaccttcaccatgttttaacccagcacaaaaatccttaccacaagttaagcagatcccagttccaggccctttaatcttcctggaccaaaacatttttaaaaattatgactaggagaggaatctgacatagttgactccatcttgcttctaacctcacaagctgtctttgctcattcctgggcataggccaagctaactatgggaggaatttacctcatagtttaagacaaagatgatcacagtcttttcccaaaactaaccccctcttttcttgaggaccaaaaacacatctttgtaaaactaacaaattggccacaaagttagaattatggtaggaccctaaagtctgttaggaggtaggtatagttaaactctaaccagtcattgttttataatttagcttttcatatctgcttactgctcaggagtcatgtggccagaggacacaagatttgtaacttctccagttgatcctatatattacatcacgattgtaacagctaagattggtgtttaagatatttttcagaccctgcattctgacagaccaactgatgccacctggaccaataacccacaccaagaaactgactcaacttgttttgtcacttccacccaggaaatgactcaatgtaagaagacagctcctaccccctattatttcatctctgacccaaccaatcagtgttccccattccttaggacccctgcctgacaaatcttccttgaaagccctagcctctgaattctcagggaggtggatttgagaaatctctcccatccatccattcggctgccttgtgataattaaactttttccctgctgcaacactgctatctcagtgtattggctttacactgtgaagcaggcaagaagaatccttaaaaaactcacagagccatgagctaaataaacttattgtctttataaataacccagtctcatatattctcatatagcaacacaaaacaactaagacatacaccacattaacaagctaaaaaagaaaaatcacatgatcctatggattgacacagataaagcatttgacaaaattcagctctcattgattaaaaaaattcagaaaaagaggaaaagaagaaaaatccgtctaccttataaaaagtatctacaaaaacctgtggctaacaccatccttatggtggaagatggaatgctcttcttctgaaacagggaacaagggcaagggcttctccctcatcactctcactcaatatagtattggaatttccagccactgcaacaaggcaagaaaaggcatacaaatttaagaggaagaaataaaactccctttttgcaaatgataattgtctacacagaaaatcccaaggaatccacaataatcaaaagtggaattaataagtaagatctgcaaggacacaatatagcaaatcaatcccattcctgcataataacaataaatatgtgtcaaccaacatataaggtgaatataatttataattgttccaaaggaaacaaaatactgcggtataaacttaagctccctctatttcatgtttttgccatgtgacatgcctgctcctgcttcaccttccatcatgagcaaaagggccctgaggcctccccagaagaaaaatagatgatggcgccatacttgcacagcctacagaactgtcaggcaatttaacttcttttcgttataaataaaataaaaataaaacactaagcaaaacatgtacaagatctgaaaactacaaaatgttgatgaaagaattcaaagaaagtctaaataaatgaggagacatgccatgttcatggattgaaagtctaaacacagcaaagatgacaattttccccaaattgattttttaactacataatgggcaaaatatttgagtaggcaccacacaaagataaacgtgtagaaaatgcttaatatcattagtcatcagagaaatgcaaattaaaactacaatgagaagccactacacacttaaaaaaggtggctaaagtaaaaaaaaaaaatgatgatatcaattgccgacaaggagctggagtaactggaattctcataaattgctggtctaaatataaaatgacatgatcactttgggaatcgtttagcattagttctaaatttaaacatatatgtattacattactcagtaatcccactcctaggtatctccatatatctatacataaacctttatgtaagtgtttacagccatgttacttataatttcataaaactgtaattaatccagatgttcatcaattggtgaatagaatcaaatgataatgcatctatgcaatggaatgctactcagcaatgagaaaaaaaataaagaagcagatgaatctcaagtacattgtagtgggcattccatgtgaaaaaaatcaaggcacaagagcaaggcactgtatgatttcttttatgtaaaattatagagaaggccaaattataaccaacagaaaatgaaacagaggtttccaaggcttagggctagggaatgggattgaatttgaagaggtgcaagtgggtgatggaaatgttctatatcatgactgagtagataaatgtatgcgtgactgtgcacgtctaccaaaactcattgaattatgctcttacgtttggtaaattacatgcatgtaaattataactcattaaagctgatatacaatttaaaatttgcataaaatgaagacaaagaaattaaaaaaaaaatctgtacactcttgcacaagttggccgagagagaatggtgcacagaataggcaaattggataatggaggagaaggagataattgaagagcctgagtcacactggccatagtggtccaaaacaaggtaacaggtgtgacccagcccaggcacttcacaaatatttgttgagtgggtgtatgaacagaatggcagaagtctgagaaagaaaaaaaaaatagcctctggcagctggcagctgggagctggactggtgctcttggccatggtggtcttctattaaacatagacattttcaaccaacaccaacatcagaggttgctctgtgaccatgatggagtgagacaaaaacaagactctctctaatcatttctgagtacagaccaaaagaaaagcacagcgcaaaccacatcaaaaccaaacattctctcctctctgcaaatgtgggtgagtgaggttccttttttgatatttagccccacttcatttctcaggcttccagcatgcagatgaagacacgctggcatagaactgcccccgattcctgacagcactcaagccagagcacacctttgatgtgctcccaaataaccagctccaatatcaacctaacacaagttcaagccctgtaagatgtccccacaacacaatctgcctcagtttcccaccatttcccatggtgtgcaggctacaggtggtctccggtggtcttaggctagtcattgttggaatcatcaaaccctatccatgcctcctcggagctctcgttgcttgcatgtgtcctcagactataacattcatgtgaaaagtgccagggtgctggcagtacccacttacccacctacgtagatatcagcatatgagggctgcagcatgttggacccagcagtgagcccaggttaattggttcacgtcattatgttacagcttgggtgtcaccagcaccagcattcttgggggaatccacagctagggacaaacattggtggcctctctgcctcccaaagattggggaacagaggggacagagcagtaaatcaacgaacaggagtgccccttgttggcctgatatatacaaggtttctatgagcttctgggccagtgtattctagtagaaagatgccagattacctgttcaaaataccaagggtctatcccagcaccaaccttatgtcttatatattttacactcctggggagtcactcgcatgaagggtacccctgacaccaacatgtgggaagggggagaggaggggttggtcatgccattcctggacagaacagacagccgtgagaatgcggaaacatccccgctgttggcaggtccttccagagtcaaacctttcaaaagaacactcagacatgttagaaatttaccctccctcactgtggctatatgcaaatatttagctataatgtttcttttaattccataaaaagaaagggaaatgatataaaatggtaccaacctcagtattcaatgttgagagactgattaaattgatacattcagataattaaatactatgcaaatatttaaaatgacagaataatatctgatagaggaagatgtatgtccatgatctacttttcagtgaaaaaatatcagatcataaaataatgcatacaatataatcctgtttcataaaaatagtcatataatatgtgcacatataatatgtgcacatgaaataaatggctggaatcaggtccacatggagagtggttggaaatggtaatttgcatttttttgtttattctgtgtcttcagaaacacatctacaatgaacttatatctttcatatcagaaataatgaaggcttagggttttgcctttgttattggcctgtcgttcagagagtctacatcacaggtgagtttgagcagtgtcagaaatctgatatccagatgggaagaggctgcatttccgacactcagggctccccacagctgctgtttcagacccaaatcactcttacagctcaaccaaaatcctcccactgtctgagattaacgactccacccttcaaggctgagagctggaggaaagattgctaagaacactatatgccaacatgttttcagatacttgcatttctatgtcacctaaacaaagcaatgcttaccaaaaattctcagaatcccagaagcacaaagttgctaaggctgagcaagagtgatgggacatggtcacggtttactggtagagctggcactgctttctcctgtcccaagcccttctccttggaccatgctgctttcctcgtggtgagtgcttccctgtggtttaaccaaggaagaagacgttcctacgagaacaacaaatagattgaatacaggagctgttgggccagggggtatgtggggggcattttccccaaaacttcaagaataaatctccaaaccagtgtctttcagatgcagggatggtgctcaggataggccaagcctgtgtgaaaaccctgcagacagccattctcagggcagttgggctgccctgcactgccaaggtggtcttcccggggccttatgtccacaactgtatgggctccagggctcgcctagtttcatctggttgatttcatttcctctttctttctttccagtgatgaggttggtgaggacagtcttttacccaacccctgcataccggtgactcttatgtgagagacgccggcctaggctactatctcctgggaacagatactaacgaaatgtaatttcactgaggccacaacacatctgagaaggacaaggtgatgtggggccagccatcttcatcctaaggctccggtgcaacatcctgtgtccctggaggcccaatttgacaaacccctgcccaaggtgagcatccatctagcagggggaggcaggcttagcccatccgcatcgccctctagcctgggtccccaagagctaggttgcctgagtcactcgaggagctcagagcacataatcagactctccagagtccaggccctgcaaactatagtttggggacattcaccaggtggttctgatgcacagggaaaatccactccaattgtgcaaatagtgtatgcatggggagccttgaacccaaatcagcttaggcaaagtttacttgacatggcctgggtacttttaaaagaaaaactctggacaaattaaatttaacaggtttaactgagcaaacaatgattcaagaatcgggcaagcctcagaactctattaggtgcagagcaactccagggccgccttgtgattgcgcaacatttatagaaaaaaaaaataaaaaaggaaagtgagctacagaaaacagaagtgaggtacagagactgctccattggttaaaagttggcattgccttcattgaaccttgtttgaacagttggcctgcattcaaggatttgggaatttcacctgtaggggctttgccatggagagagagccgtgtggagcttatagggatacacaggaagatcctggctagacagggagttgctccctggaggtgcctgctaaccccatgccaccccatgatcctgcagcacggggctcctctttgttcagcaagttcatctctaaacacaataaagctgtcagaaaacactcatttctttagagggtgacttactgacatcgttagttgttgcattttcttccccagttgcaaatgaatgtttcttaaaaacagaagccatggatggtgatcctgactcttaatagcagggctgttggtgacgagccatgtgcatcctataaaaacacccacctagtcctccaacagggagatttgccttgtgcaagaatctgcacagaacactgaaggttagaacagcaagtacttcagacacgaataatgcccattagaatactctttttattttcaaaagtatttctttacccatagaaaccctacattccctcctccactttcagcatggctcatcagttcatagcaaagttcaaggcagaaacgaatttttcaatattttgccaatggctgctctacgatagaattggtcatacaggaaacaggggcattttaaaacacaaatatgttggctgggcctagagcagggatctcagttgttcctgcctatgagaaccatcaggaagccccctccacagaggctcagatttcatttttctgatataagccagggcatcatattttttcaaaaaataaaaatacttacaagttttctagtatgcattcaggcttaaggaccactggcccagcataggagacataacaggaagcattaattaagcaaagctgggctgagcacttatgtatcgggcacaatgcttgaaggcaggtgagttttcctatggtggaatcctgaagctcttatgctctgtggccagtactaataccagagcaaaggggaagccatcttgaacaccatctctgtacacactgtttcagcaaagagaagaactaccaacatcttatgttattcaagcaagactcaacccagcctaccagggtagagagaaaatctgcaagtgacaagggaagattggcaaaagagagagatgtaagcacaaagattgtacattttaaaaatctccagtaattccaggatatggacaaatgtacaagctgatagccaaagagcatataaggattttaataccacatttccagttacagctagtgaagcataattgggtactaaattacaatgttaatattcatttgaacaagtaagtgctgtacttggactagtagcatcaggaccccgggagggcagcagaggggctgcttaagtggacagagagcttctctggatgagttttgtcctaggtttggttaaggttggttctcagcagagtcttgagaggttacaacatggattgtggttgatgggatttctcccattgcagtgatgctcaaaggattcggaattaagcaagttaacatacaagtaattacaaactgcagttggtaacacatgctagaaagaaacagagaaaagaaccccaggagaaggccatagtgagaaggcattcaagacggcagatgtgcaatgggggaggaagtcctgaaacctgctgcacaatttttctagcacaaatagaaggaaagggtcttgcttgaggtcgcctattattgcggacttatctatttatacctccatttcctccaaacagagtctgaggtggggctcacctgtcatctgcaagaaaattaaagtcatttcttaaaaggggcaaaagcaaattgaagtaatgaggaggagggagagaggaggttaaaagagagagagagaaagggagagagacaaacacacacattcacacacacacacacacacacacacagccatatgtatttgagttcctttctaaaatccaaatcttacatagagcacaattttccttttgcccatttctcaaggaacttgttgtcttcctgtgcaatttctttgggcttcatacaaaaggtaagattccatattaagtaatactaattagctaggacaatcttgagtatgtaacaaaagcaaatctatcactagctgtgggggaaaaaaatagtcctcatctcccccaaaccccaaaacacataagctcagcattttaactggctgggatgagagccattattttcattaatggagctcatttttattttattgggcttttttactatcagattaaaagcatgtttttattgtagttttttctaacgcaatctgagatgatgtgctcaggatgaatggaatagttattgttttaattattttttcattctgtgattttattttgtttgttccttttatttactactcttaagtttgtcttaataacatggactcggggtgcttggaggcctccagtcatcatccccgcggtggtttgcatttgctaatgaccaaggaacagggaaatcactagcatgcggatgcttttggaactgagtcatggcccagccttcctgttgaggatgcccaggttagggccaagggcatggactcccagggttggagggagcaacacagcagctcccagaagcacctgatgtctttccaggacatttctgtccctgcgtctgctccaggctgtcctggctcactaggtcaaggaaaggctggaagggatctcaagggagggaagtcagcaaaaggacatgttcctcacctacagccacatctctccctgatgcccagttccatatgggatactgtcagaacacacaggttttcacacacagaggcccatagctggacacaggcacgtgttctctgccttgaaaaaaaaaaaggaagaccacaaaggcttcccagcaagtttagatgtcttggggaccctgtgggcctaggagaaccagaaacaagggcagggcagagttgcttacttagaacagaaatcaagtactgctttgggagttagctgtccaggggccaagctgaaacaataccggacactgcaagttactcagaagcccgaccctcagccctgccatttgcaacaacacagatgaatgttatgttaaatgaaattagccagacatagaaagaaagcactggctgggagtggtggctcatgcctgtaatcccagcactttgggaggtggaggcaggcagatcacttgaggccaggagttcaagaccagcctggccaacatggtgaaatcccgtctctacaaaaaatacaaaaattagccgggcctggtggcatgaacctgtaatcccagctactcgggaggctgaggcaagagaattgcttgaacccaggaggcggaggctgcagtgagccaagattgtgctactgcactccagccagggcaatagagcgagactccatctcaaaaaaaaagaaagaaagcactatgtgatgtcacttatacacagagcctaaaaaggtcaaatacacagaggcagagagtggaatgctggttaccaggggcagggagctgggagaacgctggtcttagggtacaaagttgcagcaatgtaggaggtgtaagtccagaaatgtaacgtacagcagggagattacagttactagtagcgtattgtttgctggaaatttgctaagagagatttcaggtgctctcactacacgcccacacacacacaaagggaactaggagaggagacatggatacgttaatttgcttggcgggattaatcattccactaggtctatcagaacttcatgttgtatgccttacatatatgcaatgaaaatattgggcatataaatgcccataattgcctgatcaaggattcatttggggtcacttgtgtgccagtactcacattctctgggcctgttctccactgtgactgaagaaagaatctgtcttcctcacgagaagccttggcctgtgcttgggtttaccacagtccctccctctctctaaagtgtcatcacggactctagttgcctgcctgcaccccatttgcagaaggagtccccaaagtatgctctagtttccaagcctgtttgaattaaaatctggcaaagaactaaagatcacgttactccctgctcaaagggcttcccaacacattcaatataaaatctgaacactgtgtggccccaagaagccctctgtgacccgaccctctcatcgttatcctcatctgctcccatctctgcccagaggcttcacagagaggctgcctgtcattacctgccatgccccccatggctcctgtgccctcacctgtcttcctttctgtcatggctctgtcatccctgactggcattagttatgcttttattgactatctctccacctgagaatgagcacatgagggaaaaaattttgtctgccccttcatcaccaccgtgtctccagcacaacagccctaggtacttggtaggtagtcaaggaatatttggaagatgctagggctctctgtttttgtttttgtttttttgacagagcctccctctgtcgtccaggctagaatgcagtggcatgatctcagctcactgcaacctccatctcccgggttcaagtgattctcctgcctcagcctccccagtagctgggattacaggcctctgccaccatgcctggctaatttttgtatttttagtagagacagggtttcaccatgttggccaggctggtctccaactcctgacctcaggtgatccacctgcctcggcctcccaaagtgctggaaatacaggagtgagccaccgcgccaggcctagggctctcttttcactgctgcatcccctgtactgggaacagtcctgggcatatagtagatggtcagtaaatgcttttcatccagggacaagttgaaaaagcactgggcatgtcaacacccagatttgcataaccaaagactcctttgtttccactcgtgtcccaatggatgaagaaggaatttcaggagtgaaggtgaacctaggactcaggtatctctttccagccctcctcaaacccacagaatactgcggaggtcactttattttgttactgaacaaaggtaagggatataatgctttaaaatccccataaagcctgcttgttaatcaatgttgaatcactaatgcaatttattacatcctttgattcatacatatccatttcacaagacatattctatctataccaacattttacacaaggatcgaaacagaatattgagcacagtttaacaaaatctaggcactaatttctggaaataaattctacttatcaaaaggcattgttcccctaagggaagcaaccactattatctaaagaactgtttttttcataaagataacttggaagaatctaccgtgcctttggagaaaatacccagattcaagttacatacacgaaagacttgtatttatcatgatccaaattcacaacactcaagtgccaaggtcgcatggtctccaggaattctgagtgggagagatgaattcaccatcaataaggactagtatattgtccttgaatattgcacttgtgaattccatattgaataagattctattttgctccagagttttggagttatctgtcattttgaaaattcttgatctaagctcggcagactttggttagttctatttggttctatttggttggttagcaaatataaccaaccatcccttaaaaggtgctgcaggagacaacaaagctgtggatcacgggtttataaaaagaaaatgttcggcactcacaaataattgcacgtcatttggctggcagtatgtggaatgcaagtcagaccttgtagtttaacctcagggttgagctgcatgcagatttctgcattggttcactaggaataatggatgactactgattattattacatattatcaaatgtatattataaaaattatatcattaagtattatataaatataatcacaaagatggcaatggccaaaacttcgtgagtgccttctctctactaaacaacatgctaggccccttacaggcatttttcccttttaacgaccacgcccacagcggtggcaccattattcttactttcagatgaggaacgtgggacagagagaggctaggttgcttgcccaaggggatcactggtgcaaatgaggccccggcagccaaggggaatgaggtgtgaagctacacacagagtgaggggccatggcaaacccaagggctgagctgcggctgctgtggccatatctccacatttcaagagaaccgcacatcctgatttcaatttgcaaacattaaaaacgtgatagacacagatgaaacacagctccaggcccacagccaatcctctgggcaccatttggccaactctacaccctcttcctttgctcctgtgctgtttggatggcttgttttttcctcccccacgaagttgtagagttctgagaacaaggaccgtatctcacacagctttcatctccttccaggtaacaccagtgctggctgggagtatgcgatggtacgctggggacagatggtacccccaaccccaggatccaaatcctgcccagtttgccttcttggacacaggggctcatttggagtctcagcgtccatgtcttgctaccttttacgtagcaactgtgctctaaaatgaagaagcaaagccaggtgactcagtgggcatgggggtgcttgtgactgggggccagagctgcagggtctgtttcaggggcggtggggccctgtcagccacatgctcagacacccagatctaaacaccttgcagtgattatccaggcaaccctgagtctagaatcttccttctccttgcacatcttcttcaccgtaccaatttgaagcaatactgtaaagtggtaccagctcagacacacacacccagaacatggaaacttgtatatacacactcagcacatgaggacatgtgtgcacatacccagaacatgggagtgtgtatatacacacccagaacacgagagcttgtgtgcacacccagaacatgggaacatttgtaaacacacccagaacatgaggactcgtgtgtgtacacccagaatgtgagggtatgtgtgtgcacacccagaacatgggaatgtgtgtatacacagccagaacatgaggacataagtgtgtacacccagaatatgagggtatgtctgtatacactcagaacatgggaatatgtgtattcatacccagaatgtgagaacatgtgcgtgcaaaccaagaacatgagaacatatgtgtgcacacccagaacatgagaacatgtgtgtgcaaaccagaacatgagaacatgtgtgtgcaaaccagaacatgagaacatgtgtgtgcgcacatgaggggctgtctgttcacaccatgtgatggctaattttaggtgtcagctcgacggttaagggataccaggatagctggtatggtaaagcattattttgggtatgtgtgtgaagttgtttctacaagagttaggcgtacgagtcagggagctgagtaaggaagatctgccttctcccaatcaaggcagacaccctccaattggatgagggcccagatagaacaaaaaggccgagacaaggtcagtttgctctccgtctcttctgtgtctggaacacccatcttctcctgaccttggacaccaaaactccacattttccagcctctgaactttgagacttttaccagttcccctaccctctgttcaaaggttttcaggccatgggcctaggactgagctgcaccagcggctgccctggctctccagcttgcagatagcatactgtggaacttctcagctgccataatagtgtgagccaagtcccatagtaaatcccctctcttctatttggctagctatatctatttctatatacatgtatgcctatatctctatatcctatcagttctgtttctccagagaaccctgattcatacatgccagaacatcagaacatgtgtgtctacaccaagaacaaaagaataaagttgttcggcacactcatcttacttcaaagacaggcgttgttggagaaaattcaagatcattggttttgcatttctccagcccagcaatgaggggatgagggaggtactagtccacttgggataactaagaatggattgtcacttttcataatcagggctggctgatgggaggaggcttgctgtggggaaatgagggcaggacggggagcgtggctgtcaagtgccctaccaggctatgagcctctcaaatgtaggggttgcacaagagtgggcttagctcagccagcatctacctgtgaatgatgaaattgacttcgaggctagtgatgggtctgcaatgctgtgttcccattatttgtttattctggttggatctgtccattctgactcatcagagaaaagcaggagatgaacacagggcatattgggcattctgtgtttgagttggtatctcagaccctgctaggctgcaaagcacacacccagggacttgaggggacacccgtaaaggagggcttctctcccatacgctgccactccactgccgagcaagctccagcactaaccaccacctcctgcacacagtaagtccaggatttaatggctgggcttatctcatgcgacgttcccaaggctccatttttcatcaagcaatttttaaagagttttatgaccctgtgaacaataattttttttagtgaaagcagactgaatcgtaagtgatggtaattacaccaaactaattgtagacaaaattagtaagaggtcagatccgtttagttacaaaagaaaatatatgcttggaatacaccttaaatgatctctgggaaattaattcatcatggaaataaaaggaatcttaaatcaacagcgactctctggtaaaacatttgcaaggaataaggtttcctctttagttttggttttgatttgatgcccaggtgtcagcctgcaccaggattgcaacaggacccaggacccaggcgtttacttcagtgcagggaggaccctgcagacatttcccatgactagggttctaactgagtcatctcctttaacttagctcacaagatccttcatggcctgggcccttctactttttttttttctttcgagacagagtcttgctctatcacccaagctggagtgcagtggcatgatctcaggtcactgcaacctctgcctcccggattcaagtgattctcctgcctcagccccctgagtagctgggattacaggcatgtgccacaatgctcacctaatttttgcatttttagtagagacggggtttcaccatgttggccaagctggtcttgaacttctgacctcgtgatccgcctgccttggcctcccaaagtactgggattacaggtgtgagccaccacatctggctgcacttctactccttgtaggtttatttcccaccatactctcactacctgagactacctcagtgcctttgagttaaacaggatattcctcctggaacttttttcctgctatttctctacccatctaaataattgcctctagatcttcaggtgtcacagcccggtgttgtgaaggacagggggattacttgcctcccatatggactgggtgtccctgctctgtcccttacagaacacagagatttcatgctcacaagtgcttttgccactgttcagggacacatacctgctaggggtgggggacccaggacctggtgactgtggggcagacacacacccggcaggctgggcagtcaatacatgcttattataacactgattataaatgcttattcaatgaatgaatgggtccattacctctaagtcactcttcagcagccacatctggctgttcccctctctgctcaaagataaacagtgcctaaaggaaggcacccttagcatatcctcacctctagtaaattccactgccggggtttaaagcgtggtttggaccaccattctgagccaaaacgtcagggaaatattcaaatttagatatgaacggggaagaggaggaggggaagaaaaggaagtggtgaagaggtcagaggaagagggatggggtagccagatggacgcatgaaaaaaccaatccttacaccccagtctacctgagttgcccagccactgaaaggcagggatgcctgaagaccctggcaccaagggaaaaaaactccagcaagtcctcgtgggctctgggtaaagaaaagaggctcccaggaggaaagcccagtcagaattcaagttttggaagagacaagatggcctcaaagattcagatccactctgaaatcttttagcagtagcttcagccaagtagctctaagaaaggccctcagagatacaaaatctaagaaaaatagtcctggcatctaattacaacagtgcagtttgctgcttttatctgtaattggactgtatagtctttcattctaatttactttacatctaaactgtgataatcaagacaagcagaacagaatggtctctgactggctatcctactgacacccgttaatgcctaattataacaactaaattaaagatgtgactgtaaagaggtggaatatcagtttgaagcatttaattctgtgaaaagaagtctagattttaaatcctaagtaagaaaatcaatactatgcctcattatattggtattgctaaacagattaatgaaataaagtattttgttgtgttgcttttcttttttccaatgttctcctgatgcaatgatggtttgtaatgaaggactactgcaggggaggaagtttaaattgagagccaatttatacacagaaattgggagatagctaatctcgtttatagagcagcggctttcttttgatatggttggatttttagataggcatcatgggtctcgacttctgcagtctcgtagaacaaaaataaattcaactcaagctaagcagtggtgctgtctttcctcttcctatgaacagatgtgtcaacggggactgctgtgacagtgtcagcatctatgagcaccagtttgggacaagcatccctgaagctttgtgtgccagtggccttgttgtctatgccaggctaaatgtagccacctgtgaaggtttaagagacacagggaagctgggcaggtgaatggagaatatatgaggtccccaaagccgttcgattggttggaaggtggaggagaagccatggaggagaagccatgagaagcagccacgtttcaagttggacaccaaagcctggaaggagaaggaccaaggtgtgcagagagaagatgtcctgttcctgggaccagggagggcagcatgtgcagggtgatagcagcacgctcccaactcatccagcaacactctaagttacctgtttatttattcattcttactattgcccatcctgactttttcttttttttcttttttctcttgagacagggtctcactctgtcacccaggctggagttatcatggctcactgcagcctccaactcctgggctcaagccgccctcctccatcagcctccagagtagctcggactacaggtgtatgtgatcactcctggctaatttattttattttattttttgtaaagacagtgtctcactatgctgccccagctggtctcgaacttctgggctcaagcaattctctcgcctcagcctccaaaagtgctgggactacaggcacacaccatcatgcctggctattttgtgtgagtgtatgtacagatggggtctcactatgttgcctaggctagactcaaacctctgggctcaagcaatcctcccacctcaacctcccaaagtgctgggattacaagggtgagcagccatgcccggtctcatcctgactttgaagccttggaactcaacatcaattataagaatcaaaaacctaaaaagtggcaaaggctgtgtcaatcaccctgtgggacttccccaaatcccatgctgctgagattcaccagtgcaggtttttgaggaatccaaagaccttgcagaatagactgaccacctggaggaatctctagaaatcacctagaagtgaccttactgaccgctgagttactatgagtgaatgacttggggactatagtgtgccaggccttttctggagctggggacacaaaaatgagccacactgagtcctggccccttggagcttgccatttccaaaccactgggtcacgcaggggtgagagatccagcaggagaaggggagcacaaagccggggccccggacaatggagaaaacttcagctttggtgaatgtatccagaacttcccaattataaaatcaacaacagctgggtgcagtggcttatgcctgtaattccaacattttgggtggctgaagtgggaggatctcttgaggccaggaattcaagactggtctgcgcaacatggtgagaccctgtctccacaaattttttttttttttgagatggagtctcgctctgtcacccaggctggagtgcagtggagcgatgtcagctcactgcaagctctgcctcccgggttcacgccattcacctgcctcagcgtcccagcagctgggactacaggcgcccgccaccacgcccggctaatttttcgtatttttagaagagacaaggtttcacagtgttaggcaggatggtctcgatctcttgaccccgtgatctgcctgctttggcctcccaaagtgctgggattacaggcataagccaccacgcccggcctccacaaaaattttaaaaattagctgagcatggtggttctagcttctcgagaggctgaggcaggaggatcgcaggagcccgggaagtcgagactgcagtgagctgtgatcatgccattgcactgcagcccagaccacaacagagcaagaccctattaaaaaaaaaaaaaaagacattttagttttaaagtctaaattagatctaaatgggcatttttggcgatgagaatttttggctgttgaatgttgcttgtaccaccctctctttggattcctgttgtctttcccaatttcttaagcacatgaagatgtggaggcatgggcagggggtgccctggggaccgtgcatatgggctaagtgatcattgcaggccagagagaggttaccagcccccttagaaaggaatggtgcagctcctgaccctgcagggccagacaggactctaattgctcctttgcttctgggactcggaagacaaaccctgccgtctcccaccaggcccgcctcccagctgcacaaacaaagccaaataaaaactgccagcggccgctggtccccttgcgacagatgtggtgcctctgtgccatcttgtctgttcttaagggtttgtttttattgcaaacagacagatgtggcttgtcccttccatcttgtttacgatgctgcaggaacacctgtggaagaacaggtccctgcagaaatccttgacttccgttcagatggcttgagactaagccagccggctgggcaaccccatctgctaaggattccaggttcctctgcccagggaaacctggagaatcacccacaggataatcccagacacaggagtgtcactacacctatgtgcaccttatgttaacaatgtgtacaccttcattcaaacctgtgcagaggacctacgctgtgtgcgctgcctggccctgcagtctgcactgactgacttgtggttcagcccagcttctcactgcaaaggctgctttcattgcctgacctgtgtccacttagctatagaattcactgcattgagaacccacagccctgacccacgagtgagggccatgaggcttatgaggattgccttattgattctcccggtttcagacaaagtggctcatgacctggtgtggaacagacctgtgtcaccagggtgaattctatgcctaggtgcagagggaaggggaaatgcttgcacagagcccaggcttgggcgatatcctctgctctcagccaagctctgtacaccttcttagaattctgcggctccagccacaccattatagatcgcttgcctagcacttactttatttcattagcacagatgatgggagagcagtgacacaacttgtaactttgtgcaacaactgcctctttgtcttaaccttatgttttcatgccacagcttttgctgtgtaacaaaccacccccaaaactcagcagcttaaaaacagccactatttagttagctcacgactctgtgggtgggctgagtggttcaggcagcctcagctaatcattgctaggctcactcaggcatccaagatcagccggtgagtgggctggtggctagaagaactcagatgccctcagtcatacaactggcagctggcaggccgttggccagggtgacaagggtaatggggccacatacctctcaccaagcaacagcttaaccctggcttctccacatggtgaccacaacaagagagtgaaatagaatgtgcacatgcttttcaagtctgcctgtggtatgttttcagctgccccattggctaaagcaggtcccaaggccaagctcagagtcagtgtgggagcttgatgatgctaagagcttggagagcttagacaccagcaggagggataatttgcctccagttttgcaatccaccacaggatttttttaaaagaaatgtcttattcgttttctagcctcttccatggaatgtttccatcatttatcttcaatgtttagtgtttataaatgaggaagaagttcagttttgtttccctaattaattcacaagtatttagaatgtatctttaaattgcaattgggttaaattttctgcctaagattttcctttttttctacttctactatattggggtcatggaatttgaaattagtcctattctttaggatttttaaagccatgtgtgtgggtgtctgggtgtggaattctcattatcccatggatatttgaagactgttcagttttattgtttgatataactatatagacgcagatatatgtagatttatatttagatagagaatcaaccttgtctgtaatgtttttaaattttatctatgtttattatctgcctgatctgttacattctcagaggagaatgtcacattattgtcatatagtttttgtttgttgttgttgtttttattgttttttgagatggatcctgtcacccaggctggagtgcagtgccacgatcttggctcactgcaacctctgcctcctgggttcaagtgattctcctgcctcagcctcctgagtagctgggattacaggttcccaccatcacatcaggctaatttttttgtatttttgtagagacagggtttcgccatgtttgccaggctggtctcaaactcctgacctcaggtgatccacccgccttggtctcccaaagtgctaggattacaggcttgagccaccgtacccggcctgtcatgttgttttacttaatatatttttgtgccacattgcacaaggaagtaagagttcattaattatataggaattatgttgattcttatatattcttggttaagtaaattttttatcagtataaaacaattgtcagggcacagtggctcacacatataatcccagttctttgggaggccaagatgggaagatcagttaaggctaggagttcgagaccagcctgagctacatagtgggaccccaccctgacaaagaatttaaaaattagccaggcgtagtagagcatgcctgtagtcctagctacttgggaggctgagacaggaggatagcttcagcccaggagttcaaagttacagtcagctatgatcaagccactgcattccagcctgggcaatacagaaataccctcttaaaaataataattaaaaaactcactttatcttccttattcctggtttcacagaattccctatcgtactgtaatgagccaaaaattaataaatccacaatagtgagcatgctcattaactagctcattcatatggtgagtagaattctacattatgctcttcttggagtgaaatgtgttaatgtattttgaaattataaaaatgctgatcttggccgggcatggtggttcatgccagtaatcccagcactttgggaggctgaggtgggaagatcacttgagcccaggagtttgagaccagcctgggaaacacagtgagattcccccatctctataatcaagaaaaataaataaatgaataaataaatagtaagtaataaaaatgctcatctcacttaaaaattacaatgtttattgagataattatagattcacatttagttggaaggaataatacagaatgatcatagatcatatacactcttttcctagtttcccccaatgatagcatcttaaaaaccacagtataatttcacaacctcatactgacattgatacaactcagcaccctcattcagatgtctccagttttacgtacgctcattggtgtgtgtgtgtgtgtgtgtgtgtgtgtgtgtgtgtagttctgtacaacttaatcccatgtgtagttctgtacaacttaatcccatgtgtaggttcatgtattaatatttacaaccacagtcaagatacagaacaccacttggtgaaaacactgtccttcatccattgaatgggttttaagcctttgtaaaaaaaaatatggatcacttcgtgaatttgcatattatctttgtgtagaggccatgttaatcttctttgtattattccaaacttttattatatgcactaccaaactgaggcctgctcatactttttgacttaccaatgccacttgtgtaaataagtttctgaagatgaagttatattctccaggctatttaatgcagtaatacttataatagcaaataaaagaggaaagaggcatgtccaaaaatagtagatagaagaaacgtatttgttatctattgctgtgtaacaaattattccaaagtgtaatgactcaataattccaaagtgtaattccaaagtgtaatgatttattatatcacaatgtatgtgatatctgggtgttgctcttctgggatctctaaatgggggcctctcacaagactgctctcaggtggcagctgaggctggggttttctctgaaggttcaactgaagaagaatctacatccaagctcatttatatggttgttggtaggattcagttccaaaggtctcagttactctctggctgttttaagagtcttccttccatttattgctatgtgggcctctccacattgaagcttacattgtcataacgagcgagacaagagagtgcaagagactgctagcagtgtttcataatctaatcatagaagtgatttcccattcatttttctgtgttctactcattagaagcaagttgctaggtccagcccctactcaagaggaagggattccatacaagtgggaataccaggaggtgagatttgggggatctatgttggaagcttcttattataataagtaaattattacacattcatactattacatactatgcaaacattgaattttcttcaataattacattgggtatagggcatgttgtcataagaaatgaaaagagcttctgtaacttggaactcaatatcaagtattctaaaatatgtgaaacataaatcccaaaagaagatgaggaaaatagtgtacagataaaaatatttgaggaaataatgactgaaaatatctcaaattaagtcaaaaatacaaaacctcagatccaagagctcaatgatcctccaggaggataaaaatcaaagtaaatcacaccaatgaacattatattctaattgctggaaattcatgataaagaggaaaaacattaaacaaaccagagtgctatggtttggttgtctgtttcctccaaacctcatgttgaaatttgattcacagtgttggaggtggggctaatgggaggtgttcaggtcatgggagcaaattcctcatgaattgattaatgccctttctcaagggtgagagaattctacctctaataggtccttaaagaactggttgttaaaaagagcccagcacctcctctctcctttgcttcccctctccccacaggatcttggctcccctctgccttctgccagaaatggaagcagcctgagtccctcatcagatacagatgcccagtcttgaactttccagacaccaataattccaaagtgtaattccaaagccaaataaacctcttttctttataaattacccaacatcaggtattcctttagagcaacacaaaatgggataagacacagagggggaaaagactcttacttatagaaaaacaaagataagcataatagcttctctctcatcggagatattgcaagccagagacaatggaataacacctttaaaatgctgaaagaaaatcctgtcaacctagaagcatacatccagtgaaaatacccctcaaaatggaaagaaaaataaagactttttagatgaacaaaagtaagaaaataatcacaagttgatctgttacacagaaatgtttaagatacttcttcaggctgaaaggaactgatagaagattgcaacatgaaggaataagtctacatgaaagaataaaagacctagaaatggcaaatatatggattaaatatgaaatactttttccttatttcttaattccttaaactacatttgattattagaagaaagaaaataacattgtatggtgacattttaacatatgtgaaagtaaaatgtatgacgatcataatagaaagaatgagatggtgattacagaaagtacacaaagctactaaaactaacaaagagatttagccaagggaaaaataaaatgctagaaattatcaatccaaaagtggaaaaaaggagcaataagcaaatagaaaataaatataatggtagatttaaagccagccatgccaataataatataaaatgttgttaatgttaacactaaaaatataaaagcaagcaatatgctaagtgtctacaagaaatactctttaaatatagagaagtagggaaaagtaaaaggaggtaaaaaggcatgtaaacaatatgcatgaaaaagaaaatacagctatattataagcaaagtagacttcaagacaaagaatattcataaagacaaagacagatattttatactgataaagtatcaattaatcaagaagacataacaatcctaaatgaatcaacatataaacagttattcaaaatacattaggcaaatttaacaaaactactggaagaaatagacaaatttacaattataactgaagactttattcttgccccggtggttaagaaaacaaatagacaaaacaactgtaaggaaaaagaatatctgaatattatcaaacaatttaacctattgagctgtatatatccaagaaaacatacatatttgtttcaagtgcacatggaacattctccaagacagaccatctgttaagaaattaaagaagacacaataaatgttatgcattgaaattacatagtattttctctatgatgaaattaaatagagttaaaatagaagttaacaaatataaaatatgtttttttaaaacactactgtgttggaaagttaaacaaaatcttccaagtatgccatgaattttaaaaagtgcaaggtaaattttaaaatatcttaaatgaaatagtaataaatttataatattttaaaatttatgagatacatataaggtagaacttgaagtaattttatacctttaattgcttatattagaaacacagaaaggtttcaaaataaaaaatttaatcttgcaatctcaaaggctagaaaaatgacaaattcaataaaatgttaacagaagtaaggaaataataaagataacgaaggtaatcaataaagtagattatttctttgaaatggtaaataaaactagcaagactgaccaaggaaaaacacaaacacatattcaataccaaaaataaaataggagacattactacagattctacagacattaaaaggctaatacagggatagtatgccaagaaatttgacaattttgatgaaatttgacaatttggattaaaatatattagaaatgcacaattattcaagcatatccaagaaaaagaggaaacataattagttttatatgtagtaatgaaattaaattcaccagtataaccttctcacgattaaaaccttttcagatgacttcactgataagttctcttgtgtatttatagaacaaatgatacaaattattcacaaactttttcagagagtagaagaggagaaaatattttccatgtcattttatagagccagcaaaagccttataccaaaattagactgcacaagaaaagaacactgggccaggcatggtggctcatgtctgtaatcccagcactttgggaggctgaggcgggtggatcatgaggtaggagattgagaccatcctggctaacatgatgaaaccctgtctctactaaaaatacaaaaaattagccaggcatggtggcacgtgcctgtagtcccagctactcaggaggctaaggctggagaatcgcttgaacccgggagacagaggttgcagtgagtggggatcacaccgctgcactccagccagggcaatggagcaagactctgtaaaaaaaaaaaaaaacactacagataaatatccctcattaacatagatgataaaattttgtactaagtactataatatttaatttaccaacatatgaaaacaataatacatctcaaataaatgagattatcccccaaatacagggctgttataacattttggtgtgtaattcactacattaaaaaatgaagcagaagtactataagattatctcagtagatccagaagaaaaacctttgataaaattcagcacctccacttttcatcaaaatagaagtagtaggaaacttcctaaatttggtcatgggcttcggcagaactcccaactaacaaagttacttcaagttagacaattgatagattttcagctaatcaagagaaaggcaaggatgtttcttctccttgtactgaaattcccagtcacttttatatatgaagaaaatcctaaggaaattacaaagagaacaatattacctggactaatacatgaatttagcaatgtcacaatatacactgtaaataatacaaataaattgtatttctatataatagctgtaaaaattagattatacaatttaaaaaccatactcaatagacataaagtacttagagataaatttagcgatagatgtacaagaaatttacatgaaaaacaacatataatctctaagagaaattttaaaatatctaaataaagatctgtacctacttcatgaattgaaattctcaatacttccaagatgtcatttcttcccaaattgatctattgattcaattccatgccaagcaaaatccaacaagccttttttaaaaagaaattgaaaagctgtttctacaatttatgtaaaaatatatctagtagagccaaagcaatttttaaaaagaagaacaaaggctttcaagatttttttgtaaagtaataatagaaaaggtactatggtttctgtataaggagagacaaaaaaatcaatgagacacagcaaagaatctagaaatagattcaaatctatagggtcaataaatgtttgacaaaggcactgaagtaattcttattgcaataatagtcttttcaacaaaacattctgaaacatctcaatatctgtaaggaaaaaaataatattttactgctgtcctccatcacagacaataattaattcaaagtaaactacagacctaaacctaaaagctaaaactacaaagctcctagaagaaaacataagagagtattttcatgacttcaaggcaggcaaagatttctcaggggggaaaaaaaacaccaaaagcatttaacagaaaaacaaatgaactccatcaaaatttaaaacgtccacttatcacaggatattgataaataaatgaatgggataaccaaagacaaggagaacgtcaaatgtgtcaaatggcttatatttagaatataaagaagtcctactcaataataagatagagcaaaagatttgaacatgtatttcacaaagaaagatacaggaatggccagtttcatcaggcgcatatacattaatgagacaccacttcaaaccttagaatggctacaattaaaaggagtgaccataccaaatgttgagaatgaggagcacctggaattctcatacactgacggtggtagagtaaaatggcatagccattttggacactactagggctgtttcttataaaattacacatacacataccccatgacccaggtttgtattccttgacatttatctaagagaaattaaactatatgtccctcaaaattttgcacagcaatgttaatagaagcagcaactacaacaaaaaaggaagcaacccaaacatcaatcaacaatagaacagacaaataaattgtggtattttcatacaatgtgtactactcagtgattaaaaaaagatactaatacatccaaaatatggaagaatttcaaaaccgtcattcttactagagaagacagacaaaataatgcatactgtatgattccatttatgtgactgttttaaaacagatatgatgaatctatcatgataaaaatcagaactatggttttctctgaagagagaggctaagaatgtactgagaagggacatgaaagaactttctggagtgtggaaatggactatatcttaacacggatgtgtgtcactctagtgtgcatatttttcaaaactgatcaaactgtatatttaagatctatgcatttcactgtacgttaattatagagcaatacaaattttaaaatcttaactgataatcccgtctctttttggcaaactcctgctcattaattgtagtcctcaaaatgaaccctttcccccagccccaaaaactcattttgcagctgctatcctgccaagagaatgaaatggcaaactccagtctaatgtactttcatatgcattttttttcttcaaacacattctcttgcacctgcaacattgcactatataaaaagaatagataagaaaaccagatggaatctcatccaaatttattactaaagatagttcccaagtgaatggcagtaccacctctccttcatagccaggcagacatagcagttcaaacatttctttctgagtagtgtaaacacttctctggtttgaaagtttattaagttttcattaaattttgatattgtcctggctgcaagtgctagctggttcatacacttgaaagagcaaatgctcaaactgttcactatatttggtcggcaaaggtccctcccatttttccctcaagcccagtcaaaatcctctctggagtctcaaacttacagaaccctagacagagaaatctctaagcaaggggctattataagcatctcaagaaactcactacctttaacactgcaaccatttgcaccagtaacatcaaggtttgagcctcttcaaatcaaattttccaaccatgttgatcaataatttaaaaagactggaaaaatctatttctaaaatctgtttaaaatgttcctgggtacatgtgcaggacttgcaggttttttatacaggtaaaacatgtgccagggtcgtttgtttcacctatcaacccatcacccaggtattaagcccagcatgcattagctcttttccctaatgctctccccctgcccctgccaacaggcttcagtgtgtgttgttcccctccctgtgtccatgtgaacttattgttcagttctcacttaaaagtgagaacatgcagtgtttggttttctgttcctgcatcagtttgctgaggatgatagcttccagcttcatcaatgttcctgcaaagcacatgatctcgttccttttatgactgcatagtattccatggtgtatatgtgccacattttctttatccagtctatcattgatgggcatttgtgttgattccatgtctttgctattgtgaatagttctgcaatgaacatacacacaaccccagtaaaatgtgggcaagggaaataaacaaacacttctcaaaagaagacatacatgcagccagcaaacatacaaaaaaaagctcaacatcactgatcattagagaaatgcaaatcaaaaccacaatgagataccacctcatgctagtcggagcggtgataattaaaaagtcaagaaacaacagatgctggtgaggtggtggagaaataggaacgcttttacactgctggtgagaatgtaaattagttgatttctaaatttttaagcaggatacgtaaaatgcaaccaataatgttcagcttctggtggaattctcagaaaattccattccttattctccaaagaaaaacatgtttgtagcccctctcaatccaccttagtagatccagaagtcctaacacccccaaactctaatactagttgaatgcaaattattaatttcacagtaaaaccaatatgaagatggtaataaaaagaagtcattatgttctctcagatacattctttccatgcttacaactaatatctgtctcctgagaatctgttagcttgcatcaattcttgccactttgaaatgaattagggaccagtatattgggattggcaaaagagagaattcctgaagactggcaagcacactcctaccacctccttcttgaaaccactccaaccccagctctttatctgattgtgttagggaggctaggtctgatccaacatggaatgtcacgatgtgatgggagtcaggaaatctgtctcaactctgccactgtgtaaccatgggtaagccctttgttttcactcccccacattgccttatctgacaatctctcatttgtcttggctaagaattataggaatcattttgtgtaaagattcctgaaaatataaaccaaccatggggaccctccttaacattccatcatcaaactttcaaacatactgcatctgttcccatcttccatttttccttcctgttgcagtgagcaactcttcttgcacctaaggccaactaatccacctacacttgggatctcggccttttctgtcttctaagacagtggttcttaatcctggctgcacatgtgaatcacctagtgagcttctattgaacacacacacacacacacgcacacacacacacataccccatgccccaacctgcctccagaaaggaactgtgggggataggaatagaatcttggacatcaacattttttcaaagttctccaggaaatttgaatgcacaaccagagttgagaaaatctaatctagaaaaattgtgcaatccattattgtttctgtgggcactggttccttcccattcccaccatgcatttagaacacaattaagtcccctactacaaaagttcctccctaagtccctccacccctctctgactatcacccaattgtctcctcacaatatattgccatttgtacttgtttcattcgattttcttaaaccttaaacctgtggtcatttttgtcacctacttctttctcacttccataaaatccataaactctatccaaggtatttcttgaatatactcctttttctccactttcattgccttctcttcagttcaaaccatcaacttttctccatgacttgctgtagctagtggcctccatctaggttttcctctatccacttggtctgaaccacatcctcacgcatacatcacagagcaccagagaaacttcacagtggcacaacccacatcatgagtttctttcacatttcaactcttgtaatgcttctgtacattcaaagacatcattaagaagtgaatagataagctatagactggaagaatatattacaacaacaacacacacacacaaaacacaatacacacccacaaaacacaatacatgcaacacacacacacacacacacacacacacatttgtatctggatacaaataattaggtccagaatattttaatagtgtttagaaattctaaaagagaaagcaatgagaccaatagaaaaaaaatgcaaagcagccatttacaaaaatggccttgtattaatcagagaaatgcaatttgaaaccataacgacacaccaattccctcctccaaaatgggatgatattagagagcctggcaatatcaagcattggaaataggaattaaaataggcagctggaggttatacaaatagatacaaccactctgcagaacaattaaatttaaaaacatgcataccctgtaacccaacatctctactcctaacttttcaactaagaaaaatttgtacatatatatataaatatgtagctatgagaatgtttatggcagtatgacttatagtagcaaagaaaaaaagagatgcttatagagtcatcaaaggagaataacaattcctgcaatggaatactatgtagcagtgaaaatgaatggctcacagaaaaggaaatcattgagattgaatctaataaacatgatgtagagcaggtgcaagtgacataagatatcagacagtgtgatcatttcataaagcctaaaggaaataaaaatactgtatttgcctagagatgtgtacatattatcaaagctttcacgaaaaggagtgtgaagttaggacttaagtacagatcgtttatttgggaggtgatcccagaaaacaactgtaggggagaggagaagcgacagggaagggaaagcagccaataagaagtgtgctacttagccagctagtcgttggcacttaatcctgcagggaaattctatgtcctgtgatagctcatcagagtggggagagacctggggtatttatacaccaactccggtccacctttttctgaaagctgcagaggaggaggaattaacccctagcacttctagtctcacacagtggtggccaagtaacctctggtggccagagaaagccctcaggcaaaacaacaaaaacaaaaataaattactagttgatccctaatgcactaaaatgaaaaaggtgaggaaatgtgggtggagctcttgacagcagctgccatatataatgagctaagagcatacaaacaagcagaagaatgagaatgccatatccagaatagattaattttgagagctaagaagggggtttaaccaaggagaaatacatcagtgtaactacttttattttgttttatttcttaggcttttagatgggtagctgtaggaaacagcctgaagcctggattgagtaaacagtcccttatccacaaaggtgaggtcagggtattggaagaccacagggatagtggtggatttaaacactggctgggcgcaaggggaaagggcagagagaagttgcagaaacccagaaccagaaataaataccgcttcactctccttgcatcctccagtctcctttgatcacaccaagcaagaagccagaggtggccagaggagtcacccttccaggcacagagtgggtgggaaggtggagagttgacctggaggcaaagagaaggtgatgagcacagttggtgtgagttgttttttatatatatataaattttatttatttatatatatattttttatttatatatatattttatatatatattttatatatatatattttatatatatattttatatatattttatatatatattttatatatattttatatatatatattttatatatattttatatatatatattttatatatattttatatatatattttatatatatataaattttatatatatatttatttatatatatattttatttatatatatatggaagtattatatatatatggaagtattctatatatatatatggaagtattctatatatatatatatggaagtattctatatatatatatatatggaagtattctatatatatatatatatatatatatatatatatatatatatatatatatggaagtattccatatatatatatatagaatacttccagtatagctgaaaacatttaagaaatatctccctaatggcattagattgccttggtgttagatcgctttggtgttagaacaccaaaacctaatatggccatctggtccgcctcccaccccattctgtagcccctgctagggccacctccatggtgcacttttgtcacttgcctccttgtggccctgtgatcctccatcctttcctgtcctcagggtttccgcagatgcatctcctctggcattaaatacttttctccccttgcctttgctcagccaacccttatttaactctaaggctcccatttaaatatttcactccaaagaagctctccctgataccccagaccacagaagtccatctggtgcatacattctgtatgtgttattctccctgctaattacactttaatagcttatttatgatatcatcagcaccggcaccacacgctcaatagccacgatctctttgggttctgaggacacagacaaaataagaatctggactttttccgtcacatagcctctgttaccccagtggaggctcacccccttttcaaggctcactgagaaacagaaaatgacaacgattttggaaaccccagtattaaaatatcttctccaggtttcttacctcatccttgcaacatggtgatgctcatttaaccccagggccttagctccttgtaaaatccatgcctaacacccacgcacaaaaaatgcagcatggagcttggaaggtctttaggaggaggtttgagaaaccctagtgctcgaggaatttcaaatccatctccatgattcaatgatataaattctgaatttttctttctgaaatttaagatctctgatagaagatgactgtaacataagtgatgggccaggcgcggtggctcacacctgtaattccagcactttgggagactgaggcagctgaatcacttgaggccaggagttcaaaataacactggccaacatggtgaaaccctatctctacaaaaaatacaaaaaaaattagccaggtctggtgggctcatgcctgtagacccagctactggggaggctgaggcaggagactcgtttgaacccgggaagtggaagttgcagagagctaagatcacgtcactgcactccagcctgagagacagggtgagactctttctcaaaataatagtaataataaacaaatgaataaaaaagacagaactggagaagccaagcattcccagccctctgatgagctaggtccacaatgggtcaccaggtcacccccaggcaggcaggtatccctcgtggccacacctgaagaaacagtggagcccaggctattgtctggagcaaatcacagacacaggactgggaaaggacctaactagaaccaaatccatgcccatgtaaataggaatatcattaaatatataaagaaacatgtaacatataaatagaggcatcaacatatatgtaaataaaaattagaatagaaatgtttatagatacaacagtctagggctgtgtgccattctatagcagtgtttttctacataggaggaaagcaaacatatatacatatacatgaacctttacatagacatgtatatgtgtgtgtgtatatataacgtatatattcatatttaaatagatactgttaattatttataggtatatataaatacctatacatatagaaataacatacatacatataaatgtctacttgagatatacacaccacagcgtggtgttatgctggtatgtgccaacctctcacacctggcaaggccactctgctcaatggtgtctcttgagagggcagggtcggccggcctctccctgggggaaaggcccaccttcctttgttctgctgtcttccaagttcctccacctttgcatgcagagtgaacaggtggtgccagtctgtaggcaagagccactgcaggcctggaccggggtgtaaacatgatgtggagccacagcaactgagcgtccaccaatcaccaagctgggcaagaacacgcagtgacaatgccctctgccctcccgcaccctccccagacttctgtgagtgtcaatgtcaagactccacaccaaacattttatgctgagtctggaagttggcagtttgcttttattcacaaccctgggcaaacctgtgcaggagatataatcattttcccaaaccaagggtgaggtatgtatctcaggagagctaagttggtggcctcctccacagaggacctcatataggtccacctttgagttttgggtgctgttataaaccaggtaagtctcttccctagcatcacatggttattaacgggcagagttagcattaaccctggtatgatcccaaaaatcccatgccttctgctgtagcaagactgcccggagtgagtgtggcccctgggtgcgacccccaacccaccctccccattgccaggcaaccttcatcccctgagagtccctccacccaacagaccccctgctccataaagatgcaaggtggctcccaagcgctccctctggggagctcagtcctggcctcacctttccagacatggagcaatttctctctgagacaggcagggaacataatgaatgaacaagaccttaaggaaaaaagagagcaaatcatatttttctttcttttgagataaaaataatatgcctgcacatcagatctcctgtgacagagctaatatccaggagcaaaatcagaaaaagcatcctcctcttgctaataatgtgaacataacaacgggctcctctgacgaccacagtgccacaaaagtccctgtcaagccatagtctgcaatgagacctatgagagttcaagaggaaagtcttccctttgcttcactttatccctattcgctaagtacagccagaaaataaccgtaaaaattaacctaaagcttaatggcttatgtaagaatgccttaataaaaatatgttggcaaggttattgaactatacaattaaacccctcccactcgatacttttcagtctaatttctatctaaagcttattcagcaaacccaaatgccaatgctctccttcaatttccacttctttgaacctgctaatttacgaataagaaaggatttatttgtgttattagccacatgtaaccgcttgttgaaaaagtacttttaaatactgaaatcctgagatgcctcgagattcaccaaatatctgaaggatgactttgattttttttttcttccacaagctgtgtttgatttacatcaattaggccctccacataaggtatcatataacaggaaggctaataacccagaaataacctcattaaaagagacagcatatcggtctaaacagaatgaactctaagcagaaaaattagtgacctggaaagtagcagggagaggtaatggcagtaccaagaaaaaatacatccccgttagcaagtcaaaggagaaatcaccagcaataatgtaagaatacaatagaggcagaagcagaacatttttgtaatgtttttaatctgttcaaatcctggaacatgcaatttatttttcacctggtcaaaaatactctctgaaatcatgcatgtattccttgtagactcaggcacacaaaagggaccctcgcaccagcctgtccctaagtgggatgtgttgactgtgtctctaaggtcagctggtttccagggctctgaattttcccaccatcgtgaacactttctcagatgggtgagcccctcttggactgccacccacctgataccagcttatgccaggaatttttctccttgacataaagatgcaatctgctctatcttatggcacagcccatcagaaacacaaagctccccttctgcaactccttgttgactccaagttcccccctcccaccaaattcccattttgtgggcgttttgtaaatgcatggtttgccaagaaatgactgtttctacgaagcctcgtgcatgtggtgttttttgtttgtttgtttttgtttttgttttttaaaaaaagaacaagaaggtggtcacatcagagggaagccatttctaatggtaaaatgcagcagaaagaggaaatataggtgttgcccccagctccctggacctgaagagtctggtgcatcatgggagatcctggaagactgtattcaaatgctgctcagctcctgagtcaacagagtgatgcttaattaaagaaatagagataagctttaaatgtgtgtaagtgtttttacagagcacattaagacagggattgtagtggagtccctgagaacctcctgattcactcttatctgaatttcccatgggccattcctgggcaggtcaagccagcagataaaattcacttctccggggaccctggcttttgaggaattccccagcagcagggcatacgggagcccaagaccttgcacaaccccagaagaggatcagaaagtaggaggccagagcctaggagacctcgggaagaggctgaggcctcagcctcaaatgaccaatgctggggccacctccagggctttggggctcggggccaattccagtcatgcaatctgcatcattcatctcctgccccattcctacttagagttcagagtaccaggatgtgagccagaaatcttgatactaccttgaggtctgaagggagactcatgactgtacaaagaagcctggcaggatatctggtacttcctgcagcccatctccctgccactcctctgatctccatgaaatcacacctccagatggacaggtaactgtgagactatgtggcctggaccactaggtcaacacactgctcctggttttcagctgacactccctttctttctccaatgaaccctctgatccagcacctcgcctccccttgggagccaagctcacgctcacctacatgcctttgcccttatgccctttcccagacccaccatcgccccaggcagcctccttcctctcctcctagcctaacccacacaactctcaagtacaagctcatttcccagcaccccagaaacccttctcaatgctgtctgtcacttccagcatcacctcccggcctagctctagaatcatgcaatccctccctttttgtttggttctgttccttaactattctggaaagatgacaaaagcaaattctgcttccctagggcaggaaccacagatatgggttcctgcatggccagggctgatagttcagcaaaggcgacttggagaggacactggccaatggaggggattaaggggacagctgtttccatgtggttaggtcagaccagcactgccaaatgcaaatgttctcttttaccaaaaaaaaaataaataaatttagaaattataatttttatgtgaaatcttctggggttggtgaaggaaataatgtatacagtgatctatttccaagccaaagtgccctaagtaggcttcggtcagcaaactacagaagtaacaggatatactaggcccctgcttccatagccaatgcctgattgtcagcctcccgcttcctcccaccttagttgccttcacctgagccaaaagtgcagtctaagatgaaagtttactagcttgcgaaatagctcattttgtctgttcttatcagcctgcccagctacttagatcataagtcaaatacttaaagagcccctaagctaactaggattgcaatgcattgtgggctgcgacaaaatggagcaagacaacccaaaaaaaaaaaaaacacctagagcctctacccaacaatcaataggcaacatccgggaagactgtgacagcatagtactcagcctatgaggagctgggggagggacctgtgccctaagagataaattgcttgttgaaactgtgctgggtgtgcctgtctatcaaaaacattcagtcttgcaagaccatcattaaaagtctcactttcgctgttctctgggtctctgagtccattctttgggcttggatgggtgagtttctcacattggcaacctatgctacagcagttttaagcatgagttagccaggcagagcctattggtggccatcccagtgcatgacctggaggctgcatgctccctcccaggtgatgggaagcggcttcccaggggcctttctttctccaataaactcgctgatccagcacctcacctcacccagggagccaagctcatgccctagtaggtttgagtaggtttctctggcctgttgcatcttcccacacccctgctgctaggtgcccacctctcctacagcctacctggctgcagcccaggtgtgggaagatagaagggaccagagaaaagctggggtatctcccacctcatgccccacaacaagacaaggcttcctccccgggttccctcctgcagtgggtggggccatcccagcttttcttacagcatcatatcattaaagcaaaaaaaaagaaaaaaaaaagaaaaaaccacaaccctaaagtgtttcatgtgactccgtgagggctgccagagagctaagagcttcttaagcagcttccttccaagccatttgggccccttctataaataaagctttagacaattttgcaaaaggatatttatttacctgatagatcataacagctcctgctcctgcggtgtctttagccctgttgggtgatctttgagcacttagctccctctcacctagttaggcctctttttggacagcaaaagaaaaaaataatatagagttgagctccttggaggagcaggcacctgacgtggggtggtcctcctcgccgtgggctcactctgatccaagccattaacacagaggcggcagcaaatgccaaggggaaattattaataagcaatgtctggaagactccaagccagcacgaacatttctaaagtggcaaagggaagaggcgggaatggggggaggagggaaccaccgttgcacatttctcagaagagcaggaccaagaggaaaacagaagagaacaacccgaggaagatgaatgattacaagggaagcagttctttccctctctgggtttcacctgcttcgattttgaggtatccctacatgcttttcttgcttcaaattgtgcagaggaagggcttagctcgggcattctcagcactggcactactgatattttgaggccagaccatccttgttggggacagacctgggtatcgtaggatgccttttggcatccctggcctctacctgtgtcatgccaggagcagccccctctcctagtgtgacaactgcagcatctccaggcattgacaagtggcttctggggagaagaatcacccatggttgagaactgctgaaattagacatagagataaaattgaggatcagtgcagaaaaaaatcagaaaggtcaggaaaagaccaagacagtggacctgagttccaatcccagctccgccgcttcccgggtgaccttgattgaatgacttcctatctgggtcttaattttttttttcacttataaaatgggattataattaaccatgccaaccacataagatattggtgagagttgaaacattattcgtgtcctgtcctcagcacaaagcttggggcagaatttaaaaatcaaaaatcacccattattattgtaacaatgtttatcagcgtatgcaaaatagtctctctcacaacctaccacacatgaagggttccaattcctctgaccagtgtgcttccattcatcccaagaagcctttgctgtgtggaggccgattagcaattacctcccaccccccttaaagttatattccaggaagacctgatgcagagactgaaactatttgcatcagtcatggttggttgtaagtgactggaacccacacttaaacagaagaggagtgccccagaatgctgaggatagctccagatcccagaatcaaaaaagaaggccgtggagcctggcttagcacagggcagaaccagagcaaatctgtgcccctgacagcagagaccaatccatgccactgttggagtatgatctctggaattagttagtgccagtcttttttttcttctttgttctcacatctctctgctcaagattcacagtcccaggaggcatctgggtgcggtggctcacacttttaatcccagcactttgggaacccaagatgggaggatcacttgaggccaggagttcaagaacagcctgggcaacagagcaagactctatctttacaaaagattaaaaaattagccaggcatggtggcatgtgatagctactcaggaagctaaggcaagagggttccttgagcccaggagtttgaggctacagtgagctgtcattgcactgttgcactccagcctgggtgacagagcaagagcctgcctcgaaaaaaaaaaaaaaaaaaatcccaggagagaatgtgattgactacctggagtctcatgctcaaccctgacctgggtgagtagcaggcactttgattgacaggtcttctaagccctacctcaggaggaagggggagggtcatttctaataggaaattggagtgctgttatcccaaaaaagaaacagaacatggagagctgataaaagcaacactcactcaccacacttctgtactttagaatgtacccatttgctctttgctggggcaatagctgtgtgtttctttagcacagagagcagaagcactccacctgttcagtattcactttacacttcatcacgagttcccaaataagacttccagcctttaggctagtctgacatcccaataaaaggagaaggccatagttagagaaaatgcatatgataaagctttcatttcccccggctgagaaggccagggcacactgcgctctccccagaaatgcgacccagcatcattccatcctccacgctcacagacctatgcccttgtgccctctcccgctcccattcctcacttcaccccagagggacacagcctggcttctccactcagccctctcccaaccctatgcatacttgattcacgactccaaatatgagtacgagcttgattacaccacacctggaaagaaggccctggaactaattaatctacagtttccttcacgacacaagcccaccgtggagaggaacaggagtgaacatggcctccaggaggctgcaactctacactaagccaggagacactgaggactgccagggtgggagctatcgatttgtcaatacgcaaaacacaaccggagagtcattttttctgctgaggttaccatttatcccggaagatgctcttggcattaaagcatggcatgaaagcttcccttagatggcaggataagggaaatgttagacacccagagagagtaacttggcacctgagatttattaatattttaaatgtggaaggcatacattccagggcttactcattgcttctggggaaggatccaggtaaacaaatccacaacatcgctagaaacaaaaactccacctttccatcctgttcctgcatgggaaaatgaggatgagctaattattcagatataagtagtatctttaggataaaaggatcgaaggccttcgctgttatatctggggtttctccatcataccatcctgggagaacaaattgaaattataattttattaatgacactcggaagagtggatcaatttttccatgaactcagaacttggcaatgaagagaccatactggatcatttgaggtcaggagttcgagacgagcctggccaacatgatgaaaccacgtccctactaaaaatacaaaaaattagctgggtatggtggcacccatctgcagtctcagctactcaggaggctggggcaggagaatcacttgaacccagaaggcagaggttgcagtgagccaagtcactgcactccagcctgggtgacagagggagaccccgtctcaaaaaaaaaaaaaaagtaaacttgggtcaatctgttccccacctagggccttttctacttggatgaatctgaaagaaaaataaaaatgaaaatcagaggtcattttatgggcagattccagcaccaggattccctgtgatttgttcaaagaaacctgctcctttccacgtgtcccttacaaaaagggctcttcctgcttggaccccctgcactagtcaatccaggtgacatgaacagaagtcatttaaggctgtggcttcagactccaccagtttctccagtctcctaatgagaactgaagagaagagtcatgagaactgaaagaagagagaaagaaaaatccatcaaaacttcatttagccaaaggagcaaaaactcaggcacaaaaccggtcagttaaataatcagtttgccttgcctttttgttgttgttgttagtttgtttttaactgattttttttaatctgcctttagcagaaccattagattctggccaggagtggtggcttacacctgtaatcctagcactttaggaggccaaggcagatggatcacttgagcctaggagttcgagaccagcctagacaaaatggtgaaacctcatctctgcaataaagaaacatgcacaagttatgttcattgcagcactatccacaatagcaaagatatggaatcaacccaaatgctcatcaacgatagactggataaagaaaatgtggtacatatacaccatggaatactatgcagccatacaaaggaatgagatcatgtcctttgcaaggacatgggtggagcaggaagccattatcctcagcaaactaacacagaaacagaaaaccaaacaccacacatttttacttatgagtgggagttgaacaatgagaacacatggacacagggaggggaacaacacacactggggcctgttgggggagctgggggagggagagcatcaggataaatagctaatgcatgctgggcttgatacctaggtgatgggttgataggtgcagcaaaccaccatggcacacgtttacctacgtaacaaacctgcatgacctgcacatgtaccctgtacttaaaattaaattaaattttaaaagaatacaaaaagtaactggacatggtggtatgcacctgcagtcccagctactcaggaggctgaggagggaggatcacctgggcctggggaggttaaaacttcaatgagtcctggtcatgccactgcactccagcctgggtgacagagcaagatcctattccttaaaaaaaagaatagaaaaagaaaaaaaattcttacaggcttccaaagaagatctgctgccagaccgtcagctaaaagcaggtgccttattaaggataataggctaaagagaacctctaacactgtatttcataattagactttgcattcttttcatattatagcacttcagtaaaggataagacctcaaaatagtatactttcattgttccccttttggactttatgctatgattgtcatacactttatttttacctagattataaatgctggagtctattaccacttttatttaaacagacaattatcttttagagagagttaactaacaagaaaaatattctctacatttccccttatagttacagtggagctcttcactttctgtctagatccatatatgatggaaatatggatcttgactttgcatttttgacatacttcccagacagactttataatttgacctagagattaggcctgggtcacagagccccccggctgtttctctgccctgcagctctctctgagggtgctcccgcctgccagaaagcccaggttggaaaggcgtcttctcagaagacttctccaatcctttctgcacccatgctccctctccaggcatggtgctccctcttggtatccgcccacactttggatgggcctctcattgctcttttcattgtcaatgccacgtagacacctgcttaccctactgggctgccagcttctgtgtgctggagctcatgaggtatccatctccaatacctggccccgaaggtgtttatgttttttgttgttatttatttatttatttttgagaggagtctcactctgtcacccaacctggagtgcaatgacgtgatctcagctcactgcaacctctgccttcctggttcaagcaattatcctgcctcagcctcccaagtagctggaactacaggcacccaccaccacacccaactaatttttgtatttttagtggagacggagttttcccatgtcagccagactggtctcgaactcctgacctcaggtaattcacctgcctaggccttcccaaggtgttgggattacaggcatgagccactgcgcctggccatgaagaaaggtattttcaggtttgctttctaaacagtctctagcaaatcactctccatggttactgtggcgcatatttgcctttcttcttgaaacatcctttccaagtttaaggcattcttctcaaagagatgccagcaactcactttaccaacataacttgcagctcgagtgtggacttgtgacctagatcctgtattcaggcaccataaaacttcactctaaggaggcaaagacacagccctgtacagagtctaatctggtgggctgactgcagatacttctcacttctagacacagtggtggcagtcatgccttattctggaaactgctgctgtaagacagggatatcttatcaacatgtcagtcgcaagaattgattgaacttgtcttttttaaaaaaaaattttatttccataagtttttgggggaacaggtggtatttggttacatgagtaagttctttagtggtgatttgtaagattttgctgcacccatcacccaagcagtgcacactgaacccaatttgtagtcttttatccctcaccccccgccacaccctttccctgagtccctaaagtccattgcatcgttcttatgcccttgcatcttcacaccttagctcccacttgtaagtgagagcatacgatttttggttttcctttcctgagttgcttcacttagaataatagtctccagttccagccaggttgttgtgaatgccattaattcattcctttttatggctgagtagtattccactatatatatatatatatatatatatatatatatatatatatatatatatatatatatatatatattctgacacttatcaggtgccctataaacatacaataggagtggcaaatagcagcttgaaaaccaaatctagcctgactgtgcactccctctggtgacccagtgcctttatctatctatctatctatctatctatctatctatctatatgtatatatatatgccacaatttctttatccactcattgatgtatgggcatttaggctggctccagatttttgcaattgtgaattgtgctgccataaatatgcgtgtgcaagtatctttttttaaatggacaaagaatcatttttgtttacataaaatattcaacataaaaattattttttatttatttaaattttttaaagatcaagaaaaataactaatgggtactaggctcagtacctggaggtgtttgttatcaagtaaatggattaagctgcttggtgtgaacacaagggaaaaagcccaggcctacaagagaaaaagcattaggggacctttccactgttatcacaggtgggcccggctgatggtgggaatgtgtgggaagccaggagactccagccagggcagctgggaggggcactgcactgtagacccaggaaattggagacaggtcttggttaatttagaaagtttattttgccgaggttgaggacgtgcgcccgtatattgatgttaatgctggagaggtagagtgaggcctgtccaatcccacttccctttatggcctgaaccagtctttcaggttaaattttaagagccctggctgaggaggaagtccatttagatggttgggggggccttagaattttatttttggtttacaccacagataggtctaggccatctcataggatcctgcagcaggttcaccttgggtctagaactgattcagacttttccaggagtctcctcactagctctgatgctaccacttcccagggccctcttcataaggacctgggtattcagagggagctataaatcagctccaagacagagaggaagaatgaatggcaatcaaggaaggcttccctgagtaggggcagagcttgtgggcaccatgttcccaaggcacacacctagaaagcgcacatacctctagagtgtgcacccacctctccagcgggccctctccagggcaaatgcacctcccttgtctcccatgtctgacacttaccaggtgccctataaacatacaatagcagtggcaaacagcagcttgaaagccaaatctagcctgactgtgcactccctctggtaacccagtgcctttatcaattacctttgactgcctcaagatcaggcagcccctctccagtcccccagagtccttgccactcccttgtcttgcttattttttcacattacatgaatagccctgctaggcatttagattcaccacctttggaataagctaaggaaagcaaaaatgggattctgataaaaagaaatgaatataggggccatgcagatggtaggaaagcaagagtaaaaggatggatataggggccctgcccagtgtgttagtgaatgatgagaagtcagccactgctgctatgcagaaagaaggtagtgaagcaggaggggagagcctgattataaacagaggcaggaagggagatgcactccgcagccagaaccctggaaatcggaccttgacccagtgttccccaaaaccatcattctcacttcgtcttggcaatttttgccatatctgcataccatctgttcaaaacttactttttaaaatgtttgcctaacttaaaaaaaattaaacctcatcctaaacaatgctcaacatcaaattcatgagttttatgtactagttttgtttcttctaatacacattaaaatacaaacattaccaagaaaagtctctgatattatttaaaattatttaaccactgtttcaggcccccaggttccacactgagaatcctttcttagtgtgtcttttgtctaaaagcaagattgagacaaaacctttcacttgaatgtagccactatttttttgttttttggcaaacaaataagcatcaacgaaacaggatgccttttcatagtttttcaggtttgggacttattagaataaggctaataaatctaatagaatcagtctattccattagaataatagggtcccctttgacatttcatctcaaaatcccaatgagtctccaattgtgttcgtctttctcaatctattccctcatctcccttcgtcttctaaccactctccactgacctggacaccacgagtggggtgggccagtgtcaccagagagtcaacctgtcaacaactgaacttgttatgagttgactctgggtccagactactgcattcaaaagccatttcacacctaacacctgtgtgttcacaagcacattgctgaccttctttgtgcctcagttttgttatctgtaaaatggggatgtaaacactacctatctgataaagtcattggtgaaattgacaagttagtgcatggaaacactttgctatgttgtaaatgtctcccaaagttcttgggttgggaactctatccccaaggcaacagtgttgagaggtagaacctttaagaagtaattaggtcacttcttaatggattaatggcctgactcatgggagtgggttattgaaagagagggtttctgataagaggatgagtatggtccccttcctctctctctctcaccctcccactttctgccatgggatgacacagcaagaaggctctcaaaagattccggtaccttgatattggacatcccagcctccagaaacatgagaaataaatgtctttcctttataaattatcgagactgtggtattcaattacggcaacacaaaataggctaaggtacacctagaacagtagctggcactcatgagccaccatgctggcctgtaccagcttttgacaaattgcatcttcctggacctccctcccatcaatccagcttgatctgctgtggaacatccaacatttctctgtatcctggcagctcaagaacagttttctcacaggcttccaagtcatgccatatttggcttcaagcaatcctgttggctggatcccccaatgtctccacacattgtccctgggtcatatcttcccaccctagctgggtgttccgagaccacctgggtgcattcccagagagagaccctccctgtcctattcacatttcacagctttaacccagttaaagccctgccttttcttgggggccttccctgatcacctctttcagagttatatggctgagtgccctgtttaagtcacagatgttctcatggctgtccatagggcccagggagttgtcgtgaaaataggactcacttataccgtatcccctgtggtctgaggggtgagcaaatgacccagctaaaccactcacagttagtcctttggaaggccatattgattggtccaagtaggtcagctgagccaatcaatcagagtccttctggagaccacagtgattggtccaaggaatcagctgagccagtcagagttattcctaaggaacttctgactggagttggtgggaaaagcttctttcctctggcaaggcaagctcagaagacctgggatgaggtgtcagccttgtagagaagcgaatgctgagggaagtgagtcagggaggtaaagacagaaagtcctgagagtattgagtctcagactccagattccctgccccgtctgtgatttaacatgaaaacaagcccagaatcctgacagtgaataaacaccctgcctttttgttaaagctatccagaattggtttatatttctggaaagtaaagaaactgtaataggctgtgcttcccaggctagcctttgttatgtgtgtatattttttaatttagttgttcacatgtttaagtcatccctgtctatatgagagagaggaacatatcccatgcttccttcatttctctccctacacttggcacaatcttgggcacaaaatagatgctcactaaatacgtaggcccacagaggatgctagaattggctggtaggcccagctgcaaacaggaaaattctggatcacctagagtcagcctacaagagtgcccatcacaaatgtgcaggaatcgagtcacagagaattatggttttctcagtaaaggttgcttaaaacaaaagcccattcatctgcctgcagaagacatttaatcaatttacatgagggatttcaaaattagtcagactgtaatgaactatgaaatactgattaatgcatttttgcaatgtttgattagaaacttaacatgtatgcgagcacatctttaccattacagcatttctatgttaatatttggttcttaaccatcggcagaatagatattctgaattacagaaccaaagtgtatttgtggtgaacaatatatgcacagttttcctgctggaaagtgcttcttgatgttcaggaggtgtctcacatttgagggggtgagtgggaggaagtagttcatgggatgcagtcattatgaagttgagtatgagctgctaaattatttgagagttctccagaaaccactagggtaaaagaggccagccatgtctcccaccccagccctccgctaacaacaaggcattctctgaaagaggaaacaatcccaattttactaaggcagaagaagccaaattcttttggccagaatttaaatataccacctcagtcaaaaatgtttgttaggttcctcctcaggacaagcaaattattaattgaaacgcttgaaaatcttcttgaacctatagaggccacagttttaacacagttttaacgttctttccttctttctctctttctttctttttctgtctttctttttttttttttttttttttttttttgagacggagtctcgctctgtcacccaggctggagtgcagtggcgcaatctcggctcactgccagctccgcctcccgggttcacgccattctcctgcctcagcctcccgagcagctgggactgcaggtgcccgccaccacgcctggttaattttttttgtacttttagtagagacggggtttcactgtgttagccaggatggtcttgatttcctgaccttgtgatccgcctgtctcggcctcccaaagtgctgggattataggcatgagccaccacgcccggccctttcttctttctttctttctttctttcttccttttctttccttcctttctttctttctttccttactttctttctttctttctttctctttcctttcttctttcttccatccctccctcccttcctccctccctctctcccttccttccttccttccttctttccttccttccttccttccttctttctttgagatggggtctcactgtcttgcccagtctggagtgcagcagcataatctcttggcttactgcaacttccacctccaagactcaagccattcttccacctcagcctcccaagtagctgggactacaggtgtgcaccgccaaacctggctaattttttctatttttggtagagacagggtttcaccatgttgcccaggctggtcttgaactcctgggctcaagtgatctgcctgccttgacctcccaaagtgctgggattacaggcatgagccaccgctcccagcccacacttttaaatttctgaggacacctccaaagatttttgtgtctgtgtatttcacagagaaggcaagttagtctctttcgtataactggaatgccctttctcctggcaagatcaacagaactccaaacatcaggtgatgctggaagtcataaaaagggaaacatgctgaattgcaaaaatccaatcaactagaagtatgatcttcttaaagttacttaaatcttatttgcacacatgcggaaaacatctaaagaggtggattgacatttttaaaaaagatgtgttaaaaattagctattaaagaatttgaagataaattcccacagtaggtttctaagagcactgatatgctgagcctggccccagccataagattatctgacaaagcccaggcatggtggctcacgcctgtaatcccagcactttggaaggccgaagcgggcggatcaaaaccagcatggccaacatggtgaaaccccatcttaactaaaatacaaaaattagccaggcgtggtggtgcacacctgtaatcccacctacttgggaggctgaggcaggagaatcacttgaacccgggaggtggaggttgcagtgagctgagatcgccccactgctctccagcctggttgacagaactggactctgtctcaaaagaaaaaagattacctgacaaacactggtttcaaaaggtgctcctgtggaaatccaatcaccatagagtgtgctaactccagaacagcaatatacaaatttgttcacatacagaagaagaggtcacatatgtgagtgcacgcgtgggtacacacagagaaacatacttcatgattcttacaagtgcaggcaattatctcacatttagattttaagcctcccttagaattttaaaaatcattattttgcaggatcgccattattctgattcattagcaaggcatacttatgagggtcttaaaataaccaggatgctggacatgtaaaaacatgcttcttgctgtcatgacaactaaataacaacaataatgctcacatccgaatgactacagggaacaaagttattgtgcctgaatatagataagttaattatggaatcatcaaaagaacagcagctctgtcaatgcaaagatgattccaaaataatcaataacaacaatcttgtttggtaattggctatttgtttccaatatgggctctacctttggtctgcgtggaaatgcagcaggctctttagccagcagaagagaaaaaaaaaaaaaaggaaaatctttcagtttagggttggtggttgtcagtagcaacaaataatggaaaattgccatctggcttctttgtttaaatgagatttgaataatcaatttaataatggatagagcacttgcttacagaagtaatccattgtcattgctcagaaaaaataaaaactttgtcaccagagacaaagctctgcggtgtgactataggtaaagcaaataaacgtctacgtacatgccacaatttttattttcactgctgactttacataaactagaggataactcttccttctctatgcttagcttttcacattctgtgtttaataatcaggacaaaatctacagagcagttggcttgctacaggcattcaactccactgatggttagtggagaaagagacacacaaatggtagatttttttagcacattttcccccatcatcatgtgacatattgtggaacaggcctgatttcagcagagcagaggaaataaaaatgcatctggctatggggtgtgtgtgagtgtgagaatgtgtgtgtgtttcctttacacagctgcacagctgcaagaggaaaaatgctattcagaaaggaagaacagggtgacaccagggatcacgatgactcattcatttacatgataaaaatgaagatagcaggaaaggtgttcctaacccgagcagaagcaggagtgatgacatccaaatatggggcttctgtcatgtcgttttgcgtgtgtgtttgtgtgtgtgtttaatgaaacatgcatgtgcagtatcccattggcctcaaaagacccttgaatctttgactaaaaaatttactggtcaggcacagtggctcatgcctgtaatcccagcactttgggaggccaaggtgggtggatcacctgaggtcaggagtttcagaccagcctggccaacatgatgaaacccccgtctctattaaaaacccaaaaattagccaggcgtggtggcaggcgcctgtaatctcagctactcaggaggctgaggcgggagaattgcttgaacctgggaggcagaggttgcattgtgctgagattgtaccagtgcactacagcctgggccacagagtgagacccattctcaaaaaaaaaaaaaaaaaaaattccatgtgatttgaaggagaaaaagggatgaaatccaggccctgtcgcattttggaaagtggcattcaggattcaaacagcaccatctgggctctacggacctacgggactggaaggcgggggcttctcctggcctccactgcttgaagactagagggtattaagggaggatcatcctggtgaatctggccttaggctcctgtttccccagaactcccgatccactcggggcacattccctttcacccggcactggttttctcctcggcctgtgtcactcggaaataccccctgtgaggtttcaggttgtttgcctcttctctgactgaagactcattactgttcacctctgcccctctcccaacccaatccacttcttatttactctcccaggacatccaatgaccaggtccctccccaggtcacagtttcattaacccccttccttcaacagggaagttagatctggttgactctcatcccagagactccctctgggacccaacttggccccagggttaccagcacttccttgacaccaaggcatcccaccatatcacctcatccagtcctgccttgggccacagagccttttataaagtcttagatagtttctcaagtcctctccacatctaggggacaactccattctggcccctcttccagctgggtcttgtgaattccctagacagagccccacagagactgagcacatttttccctgttcttcccaagacccccaccctaattcctggaaaaagcaaagccaggaggcttaacctctttcacttttccccaattatctgagccatcacctgtcacccatactctatataggggtatcttcttgccaggatttccactgcaacatggaaggaagacttgggaaaattgcagacacgtggttatgtgctcatcatcgccaacacattcagtccaaacagaatctcctgcgctaaaaaaaggaggtgttctccaccttgccagcctaatcctgtcctctctcatttctccagaactctaaaggtcccccttaccccagcagcttcaatctcctcctccctacttgttccttctcctgtatcctagtgtgcccagatcaccttgtcttgaaaagaaaaaaaaaaatccctggcctcagtatcctcggtgtcaagcagaccactgaatactcaggtcaggagtccaagaaagacatccgtggttcctatgccctccatggttcagcaaaggacataatttcattcttttttgtggctgcataatattccatagggtcacttccatttctattcttgtttcaaaatcctgaaagctcagaaggcaggttcatccatgtgctagggttgccacaacaaaataccacagatggaggcaggggcttacacagcagaaatttatttctcagagttctagaggctggaagtccaaggtgaatgtgtcagcaaatttggtttcttctgaggcctctctccatggcttgtggatggccgttttctcacggagtcctctgctctgtggctttccctcagtgcttgtgagtctttggtgtctctgtgtgtgaccagctttcctcttcttagaaggacaccagtcagatcggattagagccccactctaagggctttattttaatttactcaccttttaagaggccctatctccaaatacaactgcattctcaagtactgggggttagaggtgaatttgggatggagggtacagttcagcccagaacaccaggtgagaatgtccaagggtgtgcactaagagaggaatgcagagaagcaggtcacatccctggggggccggggttgtcagggtcaggaaagaaaaaggagagagtggatcctaaaggaaaagatcagggtttggagcaggagaggctgatccacagagacgaggactacaggatgggctgaggagtgacagcagagaagaaatcctgagatccagccatctcccctcccttgtacctctgtgaaagggagtggagcaatactggacacaggctggattcctgtggtctgagcagcaaacaggagagagaaaagcagaggccagatgcacatggaagggtgataagctgagtgaaagataagagaggccaggccagcacaatggttcatagctataatcccagcactttgaggaggctgagatgggaagatcctttgaagccagaagctcgagaccagcctgggcaacatggcaagacactgtctctatgaaaattttaaaatgtagccaggcatcgtgatttgtagtcctggctacccagaaggctgagacaggaggatcccgtgagcccaggagtttgaggctgcagtgagccatgattgtgccactgcactccagcctgggtgacagagcgagaccctgtctccagaaaaaataaataaatgaggctgggcgcagtggctcatgcctgtaatcccagaacattgggaggctgaggcagacacatcacttgaggacaggagttcaataccagcctggccaacatggtgaaaccctgtctccactaaaaatacaaaagttagccaagcatggtggtgcgttcctgtaatcccagctactcagatggctgaggtaggaggatcgcttgaacccagtaggtggaggttgcagtgagtagagattatgccactgcactccagcctggacgacagagcaagactctgtctcaaaaaaataagaaaaataaaaataaataaataaaactaagagaggccaatgcagagggtcaggttgaggatactgagagtgaaacagccaagggtaattgtagaagaaacaaaataaagagacaaaacctgtattatttactcaatgtgtacacactgtggctaagaatcaaaaccattagcatacaagaaagcatttagaaattcaaatcaatttatcatcactgtcactgtaatattgacaattattatttatttgttcaccagacatcctatgaacatgttacagttgtcgcttcatgaaaggaccagctctgcctggatttctgctgtgtaatggaagatggaaaaacttcaaacatatttttatgtcctcataatggatgcagttcaagccactgctcctacttagctaatgacttagcagggcaatggaaatacaagcaggtccctgcactttaagtgtggtcatggctcttctcaaattcaaactggcgtttctgtgcaactcttcctggcatatgagctcatggtgctgctggaacacattttcggtgggcacccagggaaccattaatcctagttgccacattcatgtgtatattcaggcttggagcatgtgaactggcttgcttggagtttgaaccaggacatcaattactaacatgtctgagaaattaatcttccgtcagaggataactcctacaggcaaaaacactttggctactgcatgtaaggacaatgttcgtgttctctgttcacatcagaaaagaaacccttattaaaggaggaggaggcctttgttaatggtgctgatactttgtagaccttaggaaaagggtcctctctgccccaagacctccagcttatagaagctgcttatgcaatggtagacccatccactctgcaataatgaacagacagataaagctttgctgggggtaagataactcagattttgctgttcacatgaagacactgtcaacttccaacccttggctccctgagcttcatttggaaatctcaaatcatcactttgtaaacaggaaagacattccctgagaatagggtggttaccagcacctctccccaaaaaaacaaaatgcagaattgtgtgggaaagaaaggcatagcatgctgccattctgcaaggagagggtgattgactcaagatagggtgataaagatcaattgccttggcttggagttatgacaccaacaaagttacaatgacattagcacaaagagagagacacaaatccattacaaagatacaatcaaatattcaaaaaagcctggcatgctccttacttattcatgctaatacaagtatattaagaaatctaaacagtgttagcgctcaatcactcacaaaccaaatgaggttttgcatttatcagactccagtcatcagggcctgtacaaaggtggtaatgtgaaataactggagatatttatatcagcctacatggacggagagatacaccaggatttattaaaatgaggaatgccatcacatttacacagcaataaaagaaataactgtgcagaagtcatttccccagacaataagatttacctttgcaatctcttaaagattttgtatgttttcaaagggtcgctggcagcatttccgaccttaataaactatttacggattaatttcttccacaaaggactggatgcccaaaagtaggttccctcctcgagagccagcaatagactctaaacctttctgtttctgaggatgctgcacacagacacgtgtattccatcttctcagggactgctctttgattaagtgacatgtcctcaattttcaataaagagaagtctattcaggatactgggatgggggtgggtggtgatgtcagtaatgatgtcctagttcaattatccagtgcttgggttttggggaacctgagaggatatttaagaagatccacaagttttacagtgaggagtgcaatgggaagccacagaagatccttgaaaagggattatgctccagcatgagagttgcctcaccagctttgctcttctctacctcccaggagttttctgctcccctggtttctgagaaaatcctcctccccatcttttcttcctccattggtgtctcttcctccctaggttcctaatgttgctgtcaactccatttctttcttttttttttttttccttcgctctgtcactcagggtgaagtgcagtggcacaatcttggctcaatgcaaacctccacctccagggttcaagcgattctcctaccacagcctccggagtagctgggattacaggcacccgccaccatacctggctaattttttgtatttttaatagagatgaggatttcatcatgttggccaggttggtctcgaactcctgaccacaggtgatccacctgttttggcctccaaaagtgctgagattatacgcttgagccaccacaccaggcttttttttttttttgaacaaagatatcttcatctttaataggggtattgctagccagtatgtgcgtgtctgtaatcccagctactccagaggctgagacaggagaatctctcaaatccgccaggcgaaggttgcagtgagccaagatcacgccactgtaatcccacctgggtgacagagtgagactctgtctcaaaaacagaaaacaaagaaacacaaaacaaaaaaccagaacttaaatagggatattgcttttcttgttaaagaacatttactgttacacattttatttcatttgttaataattttttttacatttcattttctattcagaggctacacatgcaggtttgttacaagggtgtattgtgtgatgctgaggtttgaggtccaattgaacttatcacccagatagtgaacgtaagtacccaataggtagttgttcagcccttactctcctttcttcctctccctttggaatctcaggcgtctatttttcccatccttgtgtccatgcacaccctgtgtttaggtctcacttacaagtgaggacatgtgttgttaaattttctgtttctgcattcgtttacttggatatgcaaattgcatccatgctggatttgtatccctgtttctgtaaaggacatgatttcattcttttttgtggctgtgtagtattcattcttttttgtggctgggtagtattccatgggatcactttcatttctattcttgtttcagtctcttctccccatggctggtctcatccatgcccatggcctctagagcacatggcctctggcaccccagtgattctccaaattacaatgtcccagacctctcgctggaatctcagagcttcatatccaattgctcaccacaacaccacccagaagccagacactcagagagcctgagtctgtcttgattcttcttcacctagaacagacagtgagtcacctgcaaggtatcttcatcccctccattccaacctcactggaaatgccctggtacgggccctacacctccttctcattcatgggtgcaatcccagcccatctctccttcccccagagtaatcttgctgaaacatgccttgtacttcattgctgtccctcttaaacggggccatgaatggcctagagagtgaggtccaaacattttcccagtgccacggggcccttcctgctgtcagcaagaatgtgtccttgctgatgttaggcatttgcatgaagcctaagttataaccacactgtaagcacaccctcccaccaagtggcccgtgcactctctttctgtttgcttgcttgcatatctgatgcctgggcagccttcttttgccctctttcagggtcttcctcaaaagcatctcttggggaaacagccagaatcaggcacccctccacctgtgctcctctggccctctgtgtcctccttccaattacttccagggagacagtgggctgctaaccatctggcactcagcctccttcctgcagttcaggcctggaaggattcatgatccacagcagaagctgccctacttgctaggatgtctcttttccctctgtttccctttagtgtgcaatggccaggattgggatcaaagtctaacaaggtcttgctgggcaccaggcagaaggataattctctcccagtaatccatatcataatcagttcaggtcatctcaaggaactacatagaactgtgcttatcactgcaagagacacaggaaaaggagagccagccgctgcctctcagaatctaataggaccatcctaagaagcaatttcaaaggacgtaaaagctggcttgtgccagatgcagtcaaatgccacctgctgaagggtgaagggttgagggcttgggtttcaaattctggtttctttgtgctgatggtgtgtccccacttccggccttagcatcctcacctgaacatgtcctccaggggaagacactagcctgacatcttaagtgttgttagaaggtaaatgccatgtcggctgagacactgtctgtcccattcactggcatatccccaatgtctggcacttagtgggcactcagcaagtatttacaaaggaagaaaagaaggatgaaaggagtaaggaaagaagacagggaagacgaggtggctgtctgccctttcttggttgactccctcatttgtttttcagttttagagacaaggtctctcccactatgttgctcaggctggagtgcagtggtgcaatggtgcaatcactgctcactgcagcctcaacctcccaagctcagaggatccttctgcctcagtctccagagtagctgggactatgggcgtgcaccaccatgcctggctaattttttaatttaatttaatttaatttatgtatttatttatattttgtagaaattaggttttgctttcttgtccagacttgtctctaactcccggccgcaagcagcccttccaccttggcctcccaaatcactgggattacagacatgagccactgcacctggccgactccctcattttgatggagcaagtcttccttagcttctgatacatagaaagtaaattggttaagagcttctatgactgaaaatgtcattattctagcctcatacttgattgatagtttggctaagtagagaattccaagatgaacaatttggaagatgccttctagtttccagtgtttgtgaaaaaatagaactcccccgtctctctctctctctgtctgtctccctctcatttctctttctctcctatgcatgcacacatggaggtacacatcttatagattgtctttctgtttccattattcataaatttctcagtgctgggctttagatgtggacatgtgcctatccattggcctgggcactgaagtcaaaggaagtttcaagggaatcattttctccatgacctcctcccctccggtttctctattctcttcttctggaactcagatctttactcagatctttggtttcctagagcagtcctttaatatttgttattatttatctcctattttacatctttttgtcctttcccccatctttctgagtgatttcctcaagtataacttcgctgcatggggtggggagaaattgggagatctaacagcttcttcaacagactggctaatccctgagccagtggggtattccatggtgtacatttgtggactctcagctttccccactggcttgggagttagtactcttgactaaggtacccaagtcccttactactcacacatttatttcctaccttccaaaattcttctgctgcaatttcatctgctgtttctcctgttcatgtgcctttcagaataggcagtgtctttccagtggggttggagagaagagataaaaacctcactttgttgtctatatatttatttcaattttttttgtttttttgagaaaggtctcactctgtcacccaggctggagtgcagcagtgcaaacatagctcactgcagccttgacctcctgggctccagcaatcctccttccttagcctcttaagtaactgggactacaggtgcttgccaccattcctggataatttattaatgttttgtagagcctgggtttcactatgttgcccaggcttgtctcgaatacttgacctcaagcgatcctcccaccttgacctcccaaatcactgggattacaagtgtgagccatagttcccagctacaaagattgtctataatatatatgctgcaaatattttcttccagtctaaaagttgccttttgcctgtgtttatcatgtcccctctaaatggagctgcttttgatttttatgtagagaaatctgttgctctgtctcttgagtctgaaatcttgcagaagaatttaatcagcagtactttccagtttttgttcttttaggggttcaaggcatcctctggccattagtcattcttaatgaagaaagccagaactctgaaaatgcaccattccctgccctgagtagcttcattccactgggtagtgatcagcccctagtaattcttgggacttccagtggacctgtgtgcttccagctccccagtcagacatgcaagactccattctctaggcagggtgcctgtcaagtcctcaccatgagggcacccatcctcaattcactgcatggacttgcttcttggacactatcctcggcatctccctcccccaagactgcctcattagccgggttattcaaggccgtgttcccacagggcacagctctgcgcaggagcaatgcagaccccaggtgcatacagacacagctctggcttgatgccatttataagcagtgactgataaatccagagctttggatcagataaaacttcgataaatggcctcttcacgtgctggtagcaatacctactcctgtccattctgagtcacctgctgcaattggcttcgttttgtttaatcaacagcacaggcaacaatgcttgaaagtgatcgcactggtgagaaacggtggagatagtcccctaccaaaggggacctgagacagaaaagtacaaaaactcacagccctgttcagaagcccccatgcctgggataatgcagcccatcttcctctatcttggctgtttgaagaggaacaaaggtggcatcctacagtagaccacagaggtcactgggcctgtgcacaaatgcaaggcatcaccccaagcatcccctttgctgggcacgcctcacctgcccttagtccacctgcatctggagcaagtggctcaccagccctggctacttctcagaaggaagtaagccgcctctctccctctcatgtttgtaaaaacacaactctgtcttcaccttgcctacagcatcaggtccacaaagccaccccttcccccaccatgaatcagaatcgcccagataaaggagttgtgttggcctagcagataggcaagcaaattgggcctgtttgcaagggatagagcatttggagagctgaaaacttctctaaagctgtaagaacaccattcagtcctgttcaggccactcagccacacgggacagttccatgcatgtagccccccgctaataaccattccccaccccccacccacccacacctctgcagatcaggactctcaacttggcagcccttgttgctgtccacaagaatgaaaacaaaacaaaaaaacagttttcccaggagggaagctgggtgaagaagacatgaaatgcatagagccttctccttctggcccatgacagacatgaaaacacagatgcaacacaactctggtccaaacatccctgagcctgcacattctatgaatctgtcgcttcctttgtaaaatgaggagaaagtgactcaggcttgagagacagacagtgaaaccagatttcaaagcccagttctgccactgacctgctgtgcaactcagggcaattatttaatataatctacttctctgagcttggttccttatttgtaaaatagagatttacatctcaaggtgtattcatttactcagtcattcagcaaatatttatttgacttgtactgagctccaggcagtgttctaggtgttagcgatggtcgtgaacaaatgaactctgtagggtatggcacagcacacaggtgctaagtaaataatgactgttattactctcactattgctaatgagttttgtcatgagaagcaactggaattaaagtatgttagtgtattttataagtgtaaagctctctgcagacattagctgatattatttcttccatggctcatgctctaagagaaggccaatgggttgctctcggcccctttcagaattgcaagagagctgccaccagttcttgccacatctcctgtctcatgtacacagctatcttagaattcatgctctgaacaggcagcaagagagatcaaactttttctttctccaagtctcaaggtgcctcttttgtcttgcatttctctgatcattggagctttaagcataactaccaggttttcaaattagtcatatttgtctgtgtgcatttgtacacatactaatcagcatcaaacacatctcggtggatagagatagatagatacatagatagatacatagatagacaaatgataggtagataatagacagatgatagatagatagaggttagatagatacatagactgataataaatagatgataggtagatagatgattgatagatagatagatagatagatagatagatagatagatagacagatagatctgtgattgcttacctacaataaaacctctttaaggaaggtccccaggggttgggtgttctacgaaactaagctcaaccatttctgcccccaaatgaggccatgaagagtaggaaaacaaaaggaggggagggccagctggtgctactgattttaacccagcaggctatcaggttgcactagccaaaccctgggttggataagccatggcaagatcaaggttgggctaggataactgtgaatggctcagcagtccctctccataagtagttatttctctctttggagagaagagctttgcttcaggacctctgtccatgtgtgatgaatggttgggaccagaaagacatgcatgtgacaaaaatagagtcagcttgtattcctgcagaaggtcaagtcaagtatatgcctggccctgggcaacaccaaactcaccactgctgattcctacagagtgttctcctgtcctgacatcatggctctcagggccctcccgtgcccagaaactaatcagtatcagacacatctaggagaaattcagggactgcagcctcccttgaaggtggcagagagaaccaaaccctcaacccacccccagtcacaaaggtaaaatcaggatggaaaccaaaagactcatttttgtacttaatttccattgattaaaaaaatatgtaaatgcaaagatgttgacacgattaagccattatgggcttattgcgcaattatttctttgatagttcatgacggctcaattggaggcataatggactattatgcaatgacatctttgctgagttttttgcttgttttcctcttttccttaattttctttctttcatctttcctcctttaaaaaaagagagagagaatttttcatttgcagatcattgactttttaatgtcagattatttactcaatagtcaataacgatgcctttggattcattatgggctatcgtgtaaatagctaattgcattaataacagcctttttacaaatgtttagtttgcagctcatcacacccacggactgtgtaattgctgctatcggggctgatgggcaggcacagccctgggtgcctgcatggtgacagggggacgtctgttgcctttgttctaacctgaccaagttagaaccactaaccacatctgtgcatgcatgtgtgcctgtgtgtgtttatgtagaggggagctatggcatgaacatttgtcagttatttcactttatgtttataaagatgaggagggattcttaggtggctgaaaattttgctttgaaaaccgtcgtgctaatttaaaggaggaaaagtctatgagttggaaagactaacttattaagaggcagtgtgttctgtggggcatttttctttcatagattggagctagtgattttgagagcagattcagatcctggagtgcatacagaacaaatctcccaggatctggccgatgtactcacgaggctcattgtcttcttgtcaacagggctttgtgtttgtgaacagggattctcatatgcatagagcctttgtggaagccatctaatatcttttgcatgtacatttgaggaaaactgaggcagaagataaacacggtcagcactgggtcagctggtgttcacttgtagtggggcaggtggttccttggatcaaagtgatcattttccactccttcacctgcctgttttctgagccccggggccaaccacagcatcttccttcattgtcccagggggctcctttccttccttcttgtacccttcccaagcatctcttcacagccttcactgcttggcatagaccatccctggccaagttttcagtccagatagattgctctgcatgtcaggggttcagcagtatattcaaaattgaaaatataatctcgatcactttttaaagacaattcaggacacctaccagagatcagactgagttagcattttgagtaaagggacacaaaaattgtgctctgcccccaaactgaaaggtcttcctccacaactacagtgaaccccacagtatactgggcaaggggtcttatctgcaagatgtccatccactcatcatccctccccaatacagaacgtacagaagaaccaagaccaatctgcataaaccatttaatccaaagacagcatgcacttggattgcgaacttggattgtgaacagcaccctgttcgcttggtcagtgttgacaaaatgctgaaagtcctcaggcctttgccatttcaactcctagaacttgaacttgtgggctggtgaaataacgcataaatgtctcctgttagctgcacatctctttctccacctttagaatgctttcctctatttgatcacttttcaagtattaatggtaagtcataattccaaaataattttgagagcaaaagaaaataaatacacccagcctaggagataaaaaagagttatgggactagtttagacaagattatgacacttatcattcaactaaaaccataacataataaagaattttacgcattacatggtcctcttttcttaacataaagggataaatggcacacttctcatatctagcaacataaggtactcaaatctattcagatggttctactaaaattgggagaattaggaaaaagaaaagatgcttactaactggaaaagttcatgcatttttaaagttttattttacatatgcaggtttgttacatgggtatattgcccccaggtagtgagcatagtacccagtgggtagttttttaacccacaccccctcctccctctcccctctagtagtccccagcatctattgtccctatgtttatgtccatgtatgctcaatccttagctcccacttgtaagtgagaacacatggtattttttctgttcctgcattaattagcgtaggattctggcctccagctccatccaagttgctgtaaaggacatgattttgctttttaatggctgcatagtattccattgtgtacatgtaccacattttcttaatcgagtccaccattgatggccacctaggtggatttcatgtctttgctgttgtgaataatgtggggatgaacatacatgtgcatgtgtctttttggtacaatgatttgttttcttttggatatatacccagcattgagattcctgggttgaatggtagttctgttctaagttcttgagaaatcacaaaactgctttccacagtggttgaactaatctacattcccaccaaaaatgtataagcattctctgcaacctcaccaacatctgatgttttttgactttttgataatagccattctgactggtgtgagatggcatctcactatggttttgatttgcatttctctgatgattagtgatgcattatatcatatgcttgttggctgcttatatgtcttcttttggaacatgtctgtttatgtctttcattcattttttaaggggcttatttgttttttagtccagaaatttctgagtcttggttgcaaatgtcagaaaccaatttcaaggtggtttagggtaagtggatttatcaagaacatcctccaggtgccccatagagccaaacagagcagtgggctggatcacaggagccctaggaggcaaagcattcagggctctcacactctcttaccacttcttccccctccctctctctgccaaggtgagagcaccatggtgagggcaccaaggtgagggcaccatggcagccaaacactcccaagattctactgctgaaaagaaagtctctctggatcccaaatccaaaaaattataattgttgagtatccaccactgaacttaacaatggtgccaggagatcattggaatcatagctaatcacccaagaccatttgaatgcagcagagagagtgggggaatgatggaacagattatatgagaaaagggagaaaaattgggataagcagtgaaaacaaaatgtattctctacgtacaggcaggatttcccatggtagtaattatgaccctctttcagttatccatgccttgggcatagctaatgagcagcagctggggtaagcggaagcagagttacagacaatcagcaagcatttgccaaacccttgcaacatggactgtgatatagtttggatgttttgtccccttcaaatctcatgctgaaatgtgacccccacctgatttcaaattatactacagagttatagtaaccaaaacagcatggtactgacataaaaacagacacatagactaatagaacagaacaaagaaccaagaaacaaacaaatccacatgcctagagttaacttattctccacaagatgtcaaaaacatacactggggagactcagtctcttcaataaatagtgcagggaaaactggggatctgtatgcagaagaatgaaactagacccctatctcctgccacataaaaaaatcaactcaaaattggttaaacacttaaattaaacattggagacactcttcaggacattggtctgggcaaaaatttcttgagagtacttgagagtactaataagccacaaacacaggcaaccaaagcaaaaatggacaaatgggatcacatcaagttaaaaagcttccgcacagcaaaggtaacaatcaacaaagtgaagagacaactcacggaatggaagaaagtatttgcaaactacctatctaatgagggattaataaccagaacatacaaggaactcaaacaactctacgagagaaaaatctaataatctgatcaaaaatgggcaaaagtacatacaaatggcaaactggtatgtgaaaaagtgctcaacctcattcattatcagagaaatgcaaatcaaaactacaatgagatatcatctcacccccgttaaaatggctttcatccaaatgacaggcaataacaaatgcttgtgaagatgtggagaaagggggaacccttatacactctaatgcaaattagtacaaatactatggagaagagtttggaggttcctcaaaaatctaaaaatagagctatcatatgatccagcaaccccactgctatgtatccaaaagaaaggaaatcagtatatcaaagagatgtctgccatctctgttgcagcagcatttacaatagccaagatttggaaataacttaaatgtctatcaatagatgaatggataaagaaaatgtggtacatatacactatagagtactattcagccattaaaaaaaaagaaaatgagatcctgtcatttgcaacaacatggatagaactggagatcactatgttaagtgaaacaagccagacacagaaagataaacattgcatcttatcacttacttgtgggatctaaaagtcaaaacaattgaactaatggaaatagagagtagaagaattgttaccagaggctgggaaagagagtgagggttgttgggggaggtggggatggttaatacatacaaaaaaaatagaaagaatgaataagacctactatttcatagcacaacagggagactatagtcaaaaataatttaattgtacattttaaaataactaaaagagtataattggattgtttacaacaaaaaggataaatagttgaggtgatggataccccatttaccctgatgtggttattaacacattgcatgcctgtatcaaaatatctcaagtaacccattaatatatatacctactatgccatcacaaaaattacacaggaagcggcaaacacttcctgcatgcagaccacctggggtttatggtacagaaagtggatccacctcccaagggtaatgccacatgtcccgtaacatctctgatgaaaaggtaccatctttatatgaatattccagcaagtgctaataatgctattgttcctgtcacttatgacaattccttatataacttcccagaaagatggtctgacctggacctggaattctgggaggttcagagaagcaaatatccttatccaagggatagcacggggaccccaggactctgccttaagacatcagaccatcatctctgccatccataggtctgcgctgggtgcaagtcaccagatccgttatcgggaaaccaaaacggccactttgtgagaatcacccttctccttgagcacccctgccaggtgtgctgggagattcacatggacctcactggaggaaaatccagtactagtcgatcagtggcaagtggacaaggcactcatattacaaaggattcacaccatgaataatttatttcggacttctcttcaataacaagatcccatacatattcttttcttctttgagagagagttccgcttttgctgcccaggctggagtgcagtgctcactgcaacctccgcttcctggtctcaagcaattctcctgcctcagcctctggagtagctgggattacaggtgtgcgccaccatgcccggctattttttgtatttttagcggagacagggtttcaccatgttggtcaggctggtcttgaactcctgacctcaggcaatgcacccgcctcagcctcccaaagtgctgggattacagtcgtgagccaccacgcctggccacagattcttaaatgaatcaatttccaaaagtttgtttcccatatgaagtttcagaaatatgcaaaacatgccatataattagagtccgtagaactctaggaagactggagctggaagtggctgcaggcatatgtaagcccaatgacttttctaactgaagtgtgtagaagtatcacctatgacacctgtcaaaaagacctccatgtgccttccccaggcagtctgattctgaagacctggggcagacccagcaagcctgatcctggacatccatgaatcccactgctggggaaacagaagcaggatagcttcagtgactcctggaatcacacaaagcctggacagacctgggactagaacccagagctctgatgctcaaaatgctgcctctagttcagtaactgcttttctagaatgcctagatgatgaatggcttcaacaactggaatattttatctctaattctgataagcaacaattatttcccagagggtggggcaaatagaatataaggcagaagataaggatgttttataaattggaagagaagcctccagcccctcattaatccactctgctttgctctaaactaaagaggattgcatttccttttttttttactttgaaataatagactgaaagaaaaggttccagaagaaaatccaaatgaacgcccaagccatgttctctcacaaaagaatactgagcaaacttttaatgcagatgatcctggaacaatttaatagctaagtgatccatgatttttcttaacatctatcctcattaaaagagagagagagagagaaagagagggagagaaaaaagaagctgagaaatatctttcaaacccgatgaattcaatgccacttctttttcttttacttaattttccaggtatctcagcatgatctgaataaattatgctgacaataacataatataaatgataaatcatcaacacaattttagtgatatattgcgggaaatgtaaataataaccagggctgctaattggcttgcttcttgggaacaaagctgtgaccgcgtggctgtgccagtcttggctccgtcattaagtatttctgctggtaagttgtttctgctgatctggagaggaaagcgcagcctcgcaggcaaacctttgtgtgaaacttcttctggcaagagcaagggcttaagagagagagaccgtggtgagttgcaggcgatactttctttgttcctccagagtgcctgtgggttgcaagttggcctcgattcccgtgcaaaactgtgttcccctagaagcagcagtaagactgagacaagggaaatctcttcaagtcagttaagttgctgaatctttccaaaaactcttctgactcattttgatttcttcctctctttttttttgctttgataacgatttgattacaacttcatttgaccagaaacataagctgtttctatgtgcttcttattttgaaaataccttgttagcattcatcatatgtttatggagcttaaaaatatattttgtttccttttcccaaacaaacccttctgctttctaacagggttgggcttcttatctacagtgttccctctgtgtcaaacgatgtcttcagaaaaaaaataacctggggtgtagtgggtatattcattcatttactgagcataccagaccagggtttgagtcctgaggggacaccatatgaatcccaggggcaggtttccactcttaggttcttacatcctagtgggagggccaggcagagaaagaagaaacataatacatttaaaaaattgatttgagatcatgttgtttaaaacaatatagagccataagacagagaggagcaggtgtgatagatggttccaggtggcctccacaaggaagtgacattggagttggggcttgggggaccagaaggagctggccatgcaaaggtctagggaaactgtgttccggacagaggggcagcatgtgcaaaggccctgaggctggaacagtctattaagtgtgagggagggaaaaaaaaggcagcaactggggaactggtttctcactgcagcatgatggtaccccaggggaccatttgaaaaaagaggagtttctttctgccacaccaggggtcgctgcacaagacttcacccccatagctcccacttcacatcatacctttcatcagtggggctgtgacttcagagcttccaggaatgccgctcccataaccggtcttctcccagctccttgtgctcgggatttgaatgtgtttcctcctccaacctgctggcttcctaagagtagagtcattctccttaaagattggccagcccatcactgatgtgatctagctcagagtgggtcctggaggccactgccggggactgggcctggagtgtggtttctgtgttcgtagccactgtactattccattcttgtgctgctaataaagacatacgcaagtctgggtaatttctgaagaaaaagaggtttaatggactcacagttccatggggctggggaggcctcacaatcatggtgtaaggtgaaaggcacgtcttacatggtggcaggcaagagacagtgtgtgcaagggaactctcctttattaaaccatcaaatctcgtgagacttattcactatcacaagaacagcacgggaaagacctgcccccatgattcaattacctcccaccgggtccctcccatgacatgtgggaactgtggaagctacaattcagaacgagatttaggtggggactcagccaaactatatcagccactttgggttccagacacaaaagcgcccagccaggagcctctgatgggatgcttcttgctacacccgggccctggcctgctgccccttgtttatcggccagcaaatctggcaactcaccaccctaggagtatgagagcacaatatgtgaggtccctgacccctgaaagtgaagccaccaatgcattccctggagagatcccttaagtggctcacagcagagagcaactgctttgatgaaaagttctgaagactaaagaactgcccctaaatattcctgtctcaaatgagctggcagctctacttccttctaagagttaacttggacactggcctgcaccttagagaaggtcccatgaagtcaaccagcagctgaataagggcagcttttactgtcaaaaattatcaagacagggactgtggccaaacagaagagctgcgggtttagcaactctcttcttgcagccgtcatttctaggcctccatcccaccatcatcaaaaccatttattaagcactccatctgcatagagctcccatttaggcctgggacagagtgagtctgttagacaaaaggtccccatcacagagttatgggcccatcacagacagacagtgatgaggcagactagctaattaaggcaggcattaagccaagaggcagagttacaaagcatttgcactggacacaggcagaagagtccaaaggtcctagtggggaggagaggtggggaaggagggcctcatgcaactctgccatttggatttcaaaggcttccttatccaatgaagagccatgtccattggattcaaagtcaaaggatgatcattattgttttttcatttcagtagcttttggggttcaataggtttttggttacatgaatgaattctatagtactgaattctaagattttagtgcacccacctgtcacccgagtagtgtacattgtacccaatatgtaggtttttaaatccccccacttcccaccctccccctaatctccaaagtccatcatatcactcagtctttgtgttctcatagcttagctcctacttgtaagtgagaacacgcagtgtttggttttccattcctgaattacttcacttagaataatggcctccagctcaatctaagttgctataaaatacattatttagttcctctttatggctgagtaatattccatggtgtatatgtaccacattttctttatctactcattggtcaatgggcacttagactggttccatatctttgcaactgtgagttgtgctgctataaacatgcacgtacaagtgtctttttcatataataacttctattcttttagttacatacccagcagtgggattgctacatcgaatagtagatctacgttttgttctttaaggaatctccatatcgctttccatacaagttgtactaattcacattcccaccagcagtgtaaaagtgttccctttcaccacatccacaccaacgtctattgttttttgactttttagttatgtccattcttataggaaggaggtgatagctcattgtagctgtaattcgcatttccctgataattagtgatgttgaacattttttttcatatgtttaagaaatggctttcctgtccattgcctttgtttgagttccttatagattctagacactagtcttttctcacctgcacagtttgcaaatattttctccccttctgtgggttgtctgtttactctgctgatgatgatgatgatgattattattattattattattattattattattattgtgcagaagcattttaatttaattatgtcccatttatttattttgatttttgttacatttgcttttggggtcatggtcatgaatcctttgcctaggccaatgttcagagagtttttccaatgtcatctttctgaatttttgcggtttcaggtcttagatttaagtctttgatctgttttgagttgatttttgtatgaggtaagatatggggatctagttttattcttctacatgtggcctgtccatttccccagcaccatttattaaataggttgtcttttcctcaatttatggttttgtatgctttgttgaagattagtaaaaaaaaaaaaaaaaaaaaaaattgtgtaccagacttccacttcaggagcaacatggcatagcctcaccctccccttccaatgacctctaaatataactaaatactgtggaatttattcaatagacaatgttagaaggactctaaagactggaaagaagaggatggactacctaggagacttggagcttgaatgccaatgtggtgagttcctcagattttctttgcatcttccatatactactacactaggcttcagaggagcttgcaacccagaactgccaacaagtacacacacacaaacctgcacgcacaaaagggaagccaaggcactgggcatgaggaaagccaacaaagaccatgtgggaaattccaaccctgctgcacaacccaggcccagaacagtggtctgtttgttaagcacagtggcagcaaagcccagtcatgccaacccttgtcttacaaccagggtcctgaagggtagtctgatctgtcctcagtggcaacagcaaagctccaggatagcctagactctactccataaccagacttcagtggacaggccaatctgcaatcagcagccaacagcagcagcagtgaagccccatgtctccctggtctccaaccaggagcatgaggagactcaggcccagcatctcctgcctttcctccccagaaggtcacccagtaacagcagccatcccagagaagcaagcatcttattttttctacatttgacaccatcagaaattgctcaggagccccagcagcacctgaagcatgaaacagactagaacagcatcacagggctcaaaaatctaaactgtcactggaactaaagttcacaaaagtgtgccagaaagtgcacactaaacccaaacagagtgactgcccactgaaatagaagattgaaatatgattattagtgctctgccataataatcaaaatatacaagatacaatctaattcactcctcataccaagaaccagaaaaatcataattagaaagaaacaaggcaatcaactaacacccataccaagttgcatctgatgctgaatttatctgacaaagagtttagaacaaccatggtaaaaatgcttcaacaagcaattacaaattcatatgaaacaaatgaaaaagtggaaaaaaatacaagttgtaaaagccaccaaattgaaattatataactgagaaaaaaatcccaaataaaaaatccattggtaagttcagtagtaaactggagatgacagaggacagaagcaatgaacataaagacagatcaatagaagttactcattcggaacaacagagggacaaatttaacagagcctcagggatctgtgggaaaataaccaaaggtctaatctttatattatcagaatcccagaaggaaaagagacagtgggactgaaaaagtatttgaaagaaataatagttaaaaacttccaaaatttggtaaaaataaataaataaataaataaacctgcagatttttgaagctgggtaagttccagatataaacctgaagaaatccactccaagacacatcacaatactgaaaactaaacacaacaaaaataacattaaagagagaaataatgtattaccaaaggaaaaaaacaccaatttaaatgacaatggatttttttttttatctgaagctatggaggccagaagaaagtagcacaatatttttcaagttttgggaaaaaaaaaaaaaagaagaaaagaactgtcaaccttaaatcctatatccagcaaaagtgccctttaggaataacgaaaaaataatgattttttcagacaaataaaaactaagataatttggagcacacctactgtttgagaaggggtaaggaaagctgtccaaacaaaaagaaaagaacaacagaaaaagaatataatatttgaagaagaaacaatggaatgggcaaaaacagaagtcaacataataagaccatccttcaactcatgagtttctttgtggttaaagcaacagctacaacaccatctaaggtggtgattaaggtatataaaagaaatactttaaaacaattatattttaaaagtggagaggataagggtgcctaaatagaagtaaggtctatatacacttcactttaggtgctaaaacctaaatatcttaccattatgtctatggtaagatttacagtaaccactaagaaaactgtacaaggtgacatattcaaaaatattagaaataaatcaaaatggaactgtgaaaattttgaattaatccacagaaaaggaagaaaaataaaaacagaacaaaaaaataccacaggaacaaatagaaaacaactaataaaaaagcaaacctaaatcttaacatgtcaataattactttatgtgtacatggtccaaacacagctaaaagatagtgatttagcagagtaaacaaaaaatatgacccaatacatgctatctacaagaaactcactttaaatgtgacaactaggtagattgagtgtaaaagaatggaaggaaaaaaatatgcatatatcttggaataaataatcaaaaaatcacaagagtaggtattcagatgaagggactttgaagcaagtgtgtgtgtgtgtgtgtgtgtgtgtgtgtatgacaaaaagaaacatgatgtaatgaatctgcaagaagatataacattcttaattgtgtatgcaccacataacagaacatcaaaatacatgaagcaaaaactgatagacttgaaatgagaaatagaaaaatccacaattatagttagaatttcaacatcccactattggcaactgatagaaatactagatagaaaatgaggcaggatataaaagaactgaacaccatcaaccaacagaatctatttgacatttataaaacattcccccatccagcagcagcagcagaatacatgttcttttcaagcatccttgaaaaatttaccaaggtagactatatcttgagtcatgaaacaaacctcagcaaatttaaaagaattttaaattttaaattcttttaaatcatacagactattttttttaccatgatggaatcaaactagaaattataagagaaaggcaacaggaaaacctccaataattggaaattaaacaatgcatttctaaataatccatggctcaagaggaagtcttattaaaaatacataacacaggccaggcatggtggctcacacctgtaatcccagcacttttggaagccgaggtggtcaaatcacttgagcccaggagttcgagaccagcctggccaacatggtgaaaccctgtctctactaaaaatataaaaattggtcgggcatggtggtgtacacctgtgcacctgtaatcctagctacttgggaggctgaaacatgagaatcacttgaacccaggaggcaaaggatgcaaagagctgagatctttccactgctctccaacctgggtgacagagggagaccccgtctcagaaaaaaaaaaaaagtagaacaaaattaaaataaaaacaaaccatatcaaatttatgagatcaagctaaagtaatagtaagaggaatatttgtattagtaaatatagttgacccctgaacaatatgggggttaggggtactggttccccaacccgtgccatgtagtaaaaaaagtgtgtataatttttgactcccgaaaaacataactactaacagcctgttattgaccagaagccttaccaataatataaacagttgatacacacattttatatgttatatatattatataatgtattcttacaagaaagtatgctagagaaaagaaaacattatcaagaaaatcataaagaagagaaatatatttactatttgttaagaggaagtggatcattgtaaaggtcttcatcctcatcatcttcccattgggtaaactgaaaagaaggagggaaaggaggcattggtcttgctgtctcaggggtggcacaggcaaaagaggtggaggaggtagaaagggagcaagagaggcagaccacactgagtataatcttatggaaatagatcatgatttctgtctgacttctttgcttcttcatttctctaaaaatgtttctatatggtatcaattcttcttctaccatttgctttcatttcattgcccctgtcacaaaagagtccatgttgttaaagaagtcaacagcagtcttaaatacttggaatcctttcatcggactgcctaatgtcaacctgttttctggcactgcttcttctatgtcttcctcataatctggcactggtttggaaacacctactgcaagccttcttctgttaactcctttgatgtggcatctattagttcttgaatttctccaagatctgtatcttggaacccttcatgcttcccccaccattttggccatatccacagtctctttcaagatgtccttgattggctctgtcacatatctggtgaagtcatgcataacatctggacacagttttctccagtagaaatgtattgctttgggctggatggttttcatggctttctataacaatgatggtatcttcatggaatggtataatctttccagactttcatgatgttctctctatcaaggtttctctcttccatagtatgacaatcctttctacagtgtcatgtttaataagctttaaaggtccttatgtcctcctgatctagaggctgaagtagagacattgtgtttgggagcaagtaggatgccttcagtgttgaactcattggggttctgggtggctaggggcatggttcaatttcaaaataattttaaaagacagttcctaactgccaaggtacttcctgactttagagacaaagcatctttggaactaaccccctctactgccccccaccccccaaaaaaaaaagttctcattgtccaggctgtcttgttacaggacaaccaaaagactggtagctggtgtttaccctttcctttcaaggctcaggggttagtagctttatagataagagcagtcctgatcataaatccagtgcattttcataaaacagtaaagttagcctgtcccttcctgccttaaatcctggtgctggggctggcttctcttccttatgaatagatgcttttcaagacttttttaaaaatcagaataaggagcttttgtctgcgttaaaaacctgttcaggcagatatcctttcttctcaatgattttgttaatagttcctggaaactcatctgctgcctcttggtcagcagaaggtgcttctcctgttatctttatattttttaagctaaatctctttctaaaattataacatcatcctttgctggcaataaattctccagctttagattattcgcattccttttgctttaagttgtcacataatgatttcccattttctcgaatcatgttagagtctataggtatgccttttttatagcaatcctgcacccacataaaagctgcattttcaatacaataataaaaagcatttcacaaaaaattaccaggtttttgtgcctactagtatagctgaaaagacagcttcacaagtttccttttctttttttgctatggtcctttgcctggaatcatttatcttgaaatggcagatgactgagcacactggcacatgcctgaagtcccagacacttgggaggctgtggcaggaggactgcttgagcccaagagctcaagtccagcctgggcaacaaagcaagatcccatttcttaaaaaaaaaagaaagaaagaaaaaaaggaaggaaggaagaaaatggtgggcaacagcagctttagacctcaatctatggcacctatcaagcaattaaactttttcttgtaatgtcgtgacttttttctacttcttgggagcacttccagcatcactagtggcacttagaatgggccccagagtgttattcaaggtttaaggtattgcactaaacactatgggaaatagatgagaaccacaagaaatcactttttactgagacacaaactgctcatggggagatgattagcctctcacagcactataagtagatacccttaacactagctcaccacaatagcaacaagaggaggctgctaaattattacaatagtctaacacacgctacaattacattttatgcaggtataatttaatattgcatccttacatttgtttacatttctctcaactatgaaaggtgtctgtgtttatgtatgtaagttctgataaattttaactttttctaacagatgtgtgtatattttatggtagtaagtgataaagtagactagtatttacatatattttatgcatgcataatatactgaactttaaaaaaatgatatttctatctcatacagtttgtgaattttttcaaattgttgcaaattcccaaaaaattttccagtatacttattgaaaaaaaaatccacatataaatcacagttcaaaaccattgttcaagggtaaactgtgcttacattagaaaagagaaaagttttccaatcaataatctaaattcttactttttgaaactagtagaagaacaagataaacctaaggcaagcatacaaaaggaaacaattaaatgaaaagcagaaatcaatgaaaggaaaataagaaaataaaggaaataattagaacgaatagctggttctttttttaaaaaattaataaattgataaatgtctaggcaagctaaccaagaaaaaaaaagagatgacacaaattaccaacatcagaaatgaaataagactcatcactactgttcctacgaagattaaaagaataatttaaaaattctgtgaactattccatactcacaaattttttaacttagatgagatggattgattcttgaaagacacaaattactaaaacttacacaagaagaaacaaataatctaagtaggcctacatttattaaaaaattgaattaatcattaacaaacttccaaaaagagaaagcatcaggcctggatggattcactgataaattctaccaaatatttatggtaaagactatgccagttctctacaatctcttccagaaaatagaagcaagatgcttagtaacaggccagcataacctttgacaaaatccaacacataatcacaagaaaactctcagctagctgggaactgccttaatatgatagagaacatctaccaaaaataaatagcaccatacataacagggaaaaaacagacactttccctataaagttgtcaacaaagcaaagatatcctgtcttgccactcttattcagcaggatacttgaagtcttatccagtgcaataagaaaagaaacagaaataaactttataagactggaaaggaacaagtaaaattgtctttgttcaaagatgacattattatcaatgtagaacatcccaaagaattgatcaaaaactataacaaaacaaagcaaaacaaatctcctggatttaataagtgagtataaaaggttacaggatacaagattaatatacaaaagtcaattgctttcctatataccacaatgaacaattgaaatgtgaaattcaaaaatactatcagtcaggtatggcagcttaagcctgtaatcccatcactttgggaggccaaggcaaaagaattgctggagtccaggaatccaagatcagcctaggaaacatagtgaatacactatctttacaaaaaataaaaataggcatagtgtcacatgctagcagtctcagttgcccaggaggctgaggtgggggaatcacttgagcccgggaggtaaaggctacagtgacccatgattgcatcactgtactcccgtctggggaacagagtgagactctgtctcaaataaataaataaataaatacggtttataatggcacccaaacaatgaaatacttaggaatgaaattaataagatacatatagtatctgtgcagaaaacaataaaactgtgattttaaaaaatcaaagatctaaataaatggaaggatattccatgttcattgactggaagactcaatattgttaaaatgtcagttcttcccaacttgatctatagattcaatgcaatcccaatcaaaattgcaggaagctgtttcacagatagtcacaaactgattctaaagttcatgtggaaaggcaaaatacatacaatggctcatgcaatactgaataaaaacaaagttggaagactcacacaaccaaattttaatacttataataaaggtatggaaatcaagacagtatggtattaatgaaaaagcagacacatagatcaagtgtaatagactaaaaagcccagaaatagagccacaaaatatagtcaacagatctttggcaaaagagcaaaagcaattcaagggaaaagaagtattttcaacaaatggttctgaatcaattggatgtgcatatttaaaaagagaatataaacacataccttacacttttcatcaaaattaattcaaagttgatcataaacctaaatgcaaaatataaaagtataataaacatccagaagaaaacatgagaaaaatctaagtgactttgggtttggcaatgagtgtttagatacaccaaaagtataatccaaacttaatgttatataaaaattaataagttaaattttattaaaacaaaaatttgtaagatacatatagtttctgtgtatagtctgggataaaatatttgcaaaacacatctaatgactttgggtttggcaatgggagttgacaaatgtatttcctattttctcaactataggaaaataactcaactttttttaaaactagtttaaaaatacaaggagaagatctgaacaaaaaactcacaaaagaagaaatacagatagcaaataggtaaatgagaaggtacacaacataatttatcattgaggaattgtaaattaaaacaacaataagatatcactatgtacctattagaatgactaaaatctaaaagcgtgataacatcaaatactgatgaagatacagagcaacagaaactctcattcattgcaacagggaatgcaaaatgggacagccatttgagaagacagcttggccacttcttacaaagcaaaacataaccttagccatacaaaccagcaattgcactcctatgtatctacccaactgactggaaaatgtatctatgcaaaaaactgcatgtgaatgtttataatagctttactcataattaccaaaaactgggaagcaactaagatagtcttcaatatgtaaatggataaacagattgtggtgcattcatacaatggaatatcaatataagtaatgcttaaataagtaagtatatgggaataagagacaaatctgtaagaagaattccaaataatgtacgtagatactctgccctcaaagacagggagagcacaattcctcattccttagagatggattgtgcttagtgacttctttccagcaaagtatactatgataaaatggtggtgggtggggagaatcaataactttatagtggggaaacctgacacccaacttcaacaacgttatgaaagtcagcatcaataacaatagaacatgttgatagtatgtactgttgacatgatgtgatgaaaatggccctctacctctgtggtcttcttccccaaaacccattttaattgtgataaaagctacccaggcaaatcatgataaaaacacagaacaatttccaatagaggagcatttgacaaaattcttgacaaggacttctgcaagctgtcaaggtcatcaaaacaagaaaagcctgagaaacttttatatccaaagaaatcctaaggagacaggatgactacatgtaacatggtattttggatgaaacagaagaaattttataaaacctaagaatatatgaatatagcatgggctttaattaataatactgtatcaatattcatttagtaattataacaaatgtaccatactaatgcaagatgttaatgacagaggaaactgggtattaggtatgtggaaactgtctgtagtatcttctcaatttttctctaaatccaaatttgttgtaaaaaataaatttctttttaaaaaataatagtcatttcacattactccactatgtccaactctccagcagctttcctttggatttagaatcaaattccaactagcttgcagcccttatctgagtgcctttgtgaagccttgtttactacttttcagtcaaactggtgttctttctgttctaccaacactccactctcattagcctttcagggactttgcgtacccacatttccccatatctccttgtttcttttgtccactattataatcctcagatttcaaatagtacctgaaacatagtacatgacaactggttggatggattgatgaggagatggattaatgaacatgactgttccaataacaaaccaatgataattgagtcttatgaccttgaagaagcttatctcactgcaattgtctactgatacattttgaagactcacaaaatactcaactgaatcgaaatattcgtataattttaaaaaattgttttagaagcaaaaatgtccacatgccctacaaatgctactaacctgtgtgtacatccctcttatccttagaccttatactaccttctagtgacttcttaagttaatggtctaatcacttcaaactaacactgaacaattaaggtaaacttacattaactgaatgatgtccactggacctcaatagaatttccaatgtcattttagacacttttcagacaatgtcacttggaattaaaaggaagaagttttacaactatgtagaaaataaaatttataatgatccacagggcatagcttgacctctagcagcttgcagtcaggaacagagacatggacaagaatgaacatccagataattgaacaaaatccaaaccacttcacaggtaacagtcaaggttaaacatatcttatgtatacaagccaacatagacccagtacttactacctgcagtaatttaacacttcttaaaatttcataatctctcttgcagcaaatatcaattttctttttctttttttttttttgagacagagtcttgctctgtttctcaggctggagcacagtggcacatctctgctcactgcaaacttcacctcctggtttcaagtgactctcctgcctcagcctcccaactagctaggaatacaggcgcctgccatcaatccagctaatttttgtatttttaatagagacagggttttgccgtgctggccaggttggtcttgaactcctgacctcaagtgatctgcccgaatcggcctcctaaagtgcaaacatcaattttcaaaattatcttccaaagtgcctcggggttttgtgttatagcttacataaaggtggatctgaggaacataagtaagcaagtcaacttaattggattttaggaggtctcaaccactggattttggaggtctaaccagcaagaaagattttattttgaataattacaggagagataattttctgtgcaaagaaaaagtatggaaaaaataacgaaaatgggaaccactattactctgcccacattaaatgaaaactcagttggtttcttgacatacaagcaagcaaactctaaagaaaactttgcacattagcaggatagtctagattcttgaaggcttaacttctttgcacttcaaaccccagtcttgcatgccaaacatttgatattacatcaacatcaccttgaaagaattctaactctggagacaatcagttaattaaaaaaaacacacaggggcatttttttttcttttttttttagacggagtcttgctctgtcacccaggctggagtgcagtggcacgatctcagctcattgcaagctccgcctcttgggttcatgccattctcctgcctcagcctcccaagtagctgggactacaggtgcctgccaccacacccggctaatttttcctttttttttttttttgtatttttagtagagacggggtttccccatgttagccaggatggtctcaatctcctgacctcgtgaacaacccacctcggcctcccaaagtgctgggattacaggcctgagccaccatgcccagccaggggaatattttttatgtataattattttacatgccgatctcaggaccttgattgtctcttctacatgggaactaccatggatatctaattttttggtataaaggaatacaggaatatacattcttctcaagctcatatggaacattcaccaaaatagactacattcttggccataaaatacacctgaacaaatctaaaagaataaaaataatatattgtctgctctgagatcacaatggaattaatctagaaattaattacagacagatagctggaaaatcccaaaatatttggagattaaaggacacacttctaaataacacattggccaaaaaagaaatctcaagaaaaatttaaaatattttgaattaactaaataaaataatgaactaaataaaagtaaaaccactacatattgaaatatgtggaatgtggaaaaagtgatgcttagagggaaatttatagcattgcatgaatatatttaaaaaaaagaagaaagatctaaaattaattatctaggttcccaccataggaaacaagaaaaaaaaagagaaaattaaattcaaggtaagcagaagaaaataaataatttttaaaaaacagaaagcaatgaaattgataaaaggaaatagaaaaaattaataaaaccaaaaggtggttcttttaaaaaaaatcaataaaatcaatagactgccatccagtgtaactatgaaaaaaagatagaaaaaacaaattatgaacatcagaaatgaaagaggggacatcactacagatccaatggacatcaaaattataataaaggaatggtatgaacaactttatacccataaatttgataacctagattaagtggaccaagtccttgacagacacagttcgctgtgtctgtcacgcaaactcacatgaaaggtaggcaatctgaataggcctatgcctattgccaaaatcgaatcaataaataactttgcaaagcagaaagcatttggtctactggtaaattctaccaaatacttaaggaagtaattacacggattcatttttttttacaatctctttcagaagacactgacagagggaatacagaaggtctctgacttatgtagttttacttaagatttgttgactttatgatgggtttatcagggcattaaattcatttttgacataccatgggtatcagaacacaaccccattgtacatcaaagagcatctgtacttcttaactcattctatgaggccaacattgttctaatacaaaaacctcagagacgttacaagaaaactgcaaaccaatacctctcatgagcatagatgtaaaactcctcaacaaaatactagcaaattgaatttaacaatacgtaaaaagaattatacaccatgaccaggtggaatgtatcccaattatatgaagcttgttcaatatttgagaagcaattaatgtaatccagcttatcaacaacctaaaagaataaaaatattgcataattatatcaatagatacagaaaaggcatttgaaaaaatccaatacccattcatgataaaaagcactcaacaaactaggatagaggggaacttcctcaatatgacaaagcatatttacaaaacacttacagctaatattatagttaatgggagaaaaaaccctcttagtaaaatgagaaacatggcaaggatgtcctctgttaccactgctttttaaggtggtggtagtggaaatgctaactaatgcaataagaaaataaaatttctaaaacgatatgcagattgggaagaaatgaaactctgtttacaagtggtgattgtctgggtataaagtccaaaataactgacaaaaaaataagtaattttagcaaagttgcaagatacaatattgacatacaaaagtcaatcacttttctacataccagcaatgaacaagtggaattgaaactaaaaacataatgccttttacattatcacccactagatgaaacactcaggtataaatgtaacaaaatacataagaaatatgtataaggaaaaccacaaaactctgttggaaaagtcaaagaataattaaatagagatatttcatgtttatggataggaagactcaatattgtcaagatgtcagttctcaacttgacccatggatttaatgcaatcccatcgaaatcccagcaaattattttgcaggtatcaataaataattctgaggtatatgagctgagcatggtggcaaatacctgtagtcccagatactctggaggctgaagtgaaagtattgcttaagcccaggaattcaactccagcctgggcagcatagtgagacctcatctttaaaaaaataaaataaaataataaagtttatacggagaggtcaaagacccaaaataatcagcacagtatgaagaacaaagttggaagaccgtctctaaccaacttcaagttttactgtaaaaccacggtaaacaagataatgtggcattggtgaaagaacagacaaacagctcattagaacaaaatagaaagcccggaaataggcccacataagtatagtcagcagatttttagcaaaggaaaaaaggcaataaaatggaacaaagatagtattttgaacaaatggtgcggaaacaactggacatccacatgcaaaccaaaaaaaaaaaaaaagagtctagacacagaccttacacccttcaaaacaattaactcaaagtacatcacagccccaaatgtaaaatacaaaactatgaaactcctagaaaacagtataagagaaaatccagctaatctagagtttagcaatgactttatagaccaaacaccaaagacacaatccatggaataatgaagcaataagctgaacttcattaaaattaaaaattttagccctatgaaatatgctgtcaagaaagtaaaaagagaagccacagactgggagaaatatttgcaaaagacacatctgataaagaactattattcaaaatatgcaaagaactcttaaaactcaataataagaaaatggctcatttaataaattgtgccaaagaccttaacagacacctcaacaaagaagatatgcagatggaaaataagcatatgaaaaggtgctccatgacatatgacataaggtaaatgcaaattagtacagctgtgatatacactacacacctgttagaatggccaaaatccagaacactgagacattaaatataaggatgtggagctaaaggaactcattcattgcaggtaggaatacaaaatggtacaatcactttggaaggtaatttggtgatttcttacaacactaaacacactcctgccatactatccagcaatcatactccttgatatttacccaaaggagctgaaaacagatacacagaaaaatctgcacacagatatgtatatcaactttattcattcatatgtgccaaaacttagaaaaaatcaagatgttcttcaacagatgaatggaaaaataaactgtggtacatttagacaatgaaatattatttagtgctgaaaatcaatgagctatcaagtcataaaatgagctatcaaaccgtaaaaagacagagaggagtcttaaatgcatattactaaatgagaaaagccaatgtgaaaaggcctcatactgtatgattccaactatatgacattttggaaaaggcaaaagaaggtagacagtaaaaagattagtggctgccaagggttagtgggaaggcatgaacagactgagtgcagaagatttttaggatatgaagctgctctgtacaataccatgatgataaagacgtatcatcataaccggtctgaatctgtataatgtacaacaagagtgagccctaatgtaaactatgaactttgggtgataagtatgtgtaaatgtaggttcatcagttataacaaaaatgccaccttggcaggggttgttaacaatgggggaggctgtgcacatgtggggaccgggttgtatgggaaatctctgtgtttgctgctccattttgctgtgaacctgaaactgctccaaaaataaataaaaataaaatgagattagatagaaatagatgtagataaataattacagacagttacagacacagatagatacaagtacagatagatacagatactggtatagataaagatacagataaaaatacagatacagatagatgatacagatacagatacagatagatacagatatagatacagatacaagtatagatacagatatagatccagatacaagtatagatacagatacagatagatgatacagatacagacagctacaggtacagattgatgatacagatacagatacaaatacagacagatacagatacagatatagatagatacaaatatagatacagatactgatagatgatacaaatagatacagatatatatacagatacagatatagatacagatacagatagatacagatacagatataagtacagatacagatacagatgtagatacagatagatacagatacagatatagatgcagatacagatacagataatgcaaagtgagtttagaaccaacgtctgcaccataagcatattattatgtgactgtgtccacattaaaggaaaagtgtgccctacagaaaacttattgatgccaatgtggctatgatgagttatcaacaaatagaatctatgctgaactatcatattttgccctccaaggccagtgaccagtgccaagttaacctgttaaatcccaaagcagaattatgtgaccagatggaaaattccaattgaacatctgtgttacagaaagaatggggccttccacagcctggctgaagatgcagaataatacttgttagtagtcatatctcaaaatgagaaaagtggctattccctttgtatggagctgtgaatcctgaacttttcttcatcagcaacttcttaaacatctttttcagtgaatctcctgctttggaatactgcatctatgacacaaagcaaagtaacaaataattcattttctcactttttttccttttataggtacataatattttacatatttatggggtaagtgtttgttacacatgtataatgtgtgatgatcaggtcagggtatttggggtatccatggtaagtactcaagtacttatcatgtctattgttgatatcgttttaagtccactcttatagtaactttgaaatatacaaactactgttgctaagtataatcaccctggtctgctatcaaacattagaacttatttatttcatctgactatatatttgtacgcaaactctcctcattccctcactcctactcactcacctcctcttcccagtctctggtagctgttagtctattttctatgtccatgagaacatttttgactcccacatatgagtgagactatgcaatatttgtctttctgtgcctggtttatttcacttaacataatggcctcctccagttccacccatgttgctgcaaataacataatttcattttttatggccgaatagtactccattgtgtgtacataccacatcctctttattcattcatctgctgtggacacttaggttgattccatatcttggctattgtgaatagtgctgcaataaacacgcaagagcaggtctcactttgatatacagatttattttcctttggataaatccccagtggtcgattgctgtatcttatggtagttctatttttagttttttgagaaatctccatactattttccatagtggttgtactaatttacatttccaccagcagtgtatgacttcccttttctccacttccttgctagcatctattactttttgtctttttagtaatagccatcctgactggtgtgagatgctatatcactgtggttttaatttgcctttccctgaatgattagtagtaatatcgagcattttttcatagacctgttggccattcatacatcttctcttgagacatgtttgttcccttcttttgtccatttttaatgggattatttgttttttcactatggtgttgcttagttccttgtatattctgggtattagtcccctggaggatgtgtagtttgcaaacattttctcccattcaagaggttgtttcttcacttttttgattgtttcttctgctgtgaagctttttagttttatatagtcctatatgtctacttgttttaactcttctttaatctaagacatgtggttgtcaatcagagctgcagattatcctaaaatgaccaccactagctgagttgatagacttcagaacaaaaactaggcccttgatggcctcttcagccttcagatacctcttaagaaaattcgttgttctcctttaaagattttgaagtactgaaaatagttggaggccaggcatggtggctcacgactataatctcaaaactttgggaggccgaggcaggcaaatctcctgaggtcaggagttcaagaccagcctggctgatatggtgaaaccctgtctccactaaaagtacaaaaattagccaggcatgctggtggacatctgtagtcccagctacttgggaggctgaggcaggaggatcacttgaacccgggaggcagaggttgcagtgagccaagatcacaccactgcactccagcctgggggatagggcaagactccgtccccccaaaaaaaaaaagttggaaaaattcccatccgtatttttaaagttctctatgagtttgaagatgtccaggttaagaaatattgaaatacttgagtcaagaaagtagaaagagaacctgttatttcagaaggattcagatgttccaaggaaaattgatgcatagtgacacagtctgtccaagatatgggttgactgttacctggattctgggatataatactgtacagttattagttaaccaaaaaaaggcatttatggttgttagcagcaaagaaatatatgatgttgtctccaaatgttactaaagtatcattcaatcccagaagaaaatggaacaatatttataaaattctgaaagaaaaagtaaaacaaaaaattgtcttttagcccatcacaaacaggttgttttattaagaacagattagtataattcagcaaggttggctaagggttttaggacataataacaacgtattgtgtgcttagaaaccactaagagatattttaattgttcttaccacaaaaaaatgataaatatgtgggcaatgcatatgttaattaatttgatttagacatttaataatttatacatgtttcaaaacattatgttgtacacattaaatacatgcaattttgtcaattaaaaataaataagtgagttttaggacgtagtctggttacaataatggaagacagtcatagctgctaaaatagcagctcatctttcctgtagtttttgattgcctaatattcaatctcaagtacatggtaaacatggatccttcttatggagatgaatggaattttttattttagtgaactttccttacataagtttacctcctaagagtttacaacatgatatccaatccattgtttcaactgatgaggaattatagtccaaagtgtactatggagttctgagattttgacttacatggagtagcttatagagcatccgatctcccattgaactagaaaatctagataaaatacacaaagggatgtcttctagaagaatcagaacgttaccaaagcaatcaggattaagaggccatgaccccggaagggagggaagggatgtgaaagttagcccaacattacatctactaattatccccttggaggatttaccaatcctccttggctgcaaagagcaagaggcctgagatggcatatttaatttttccttaatttcacaggctaagaacataaaaattggaattcaggactgtcactctagctaaacataaacagccaagtttccagagagtaggagtcacagacatacatctggcactctgcacctgttttctccttgagacatttactgattccaaagctttgtggggctagagtccctgaagccaagcaaagagaggaagaaaagctgaagggaggttttggctatcttaccatgctaggaatacaaaaattaaagttcagtgctcaccaatgaagcaatacactggtaaatattcaggctttcagctgagatgcctgaaggacaaaccagagatagaatcagccttacaaacagtgaaacccagacaggagtcagctcagttctggattgaatcaaattggtatgtttatactctcactgtcatgtagaagaagataatcactgaaagcttctacaatttttcagagagtatgtctggtataaaatttaaaaattatcaagcacagaaggaaacaaaaccaagtggggggtggctagaaatcatacaaataggaacatcttcatagatttaaggttatcagacattgactaaaataactatggttagcatgttcaggaaaataggcaagatgaagttctcccaagaatactttttaagaataaaatgtaattctagatctgaaaaattttaatggctgaaattgtgtactcaatagaagtgtttagtagcaaattaaacacagctttaaaaaataagtaaattggaaattaaaacaggagccaattcacttaaaatataacagagaggaaaatatatgaaaaatacagaagaaaatgtaaggggaacatgtggtacagtaaaaatgtttaatatactactgattaaagataatgaagagaggaaagagggaaaggggcatgagcaatatttgaagagataatggccagtaataattcaagaaaagaatttgccaacacaacatcataaatgggaaaaagatttccaactgaaaatcaagaaactctgcaaatgttaggcaaataaatatgaagaaactacaactcagaatatgagcgcctaactgctataacaaaaagaaaagtcccttaaaaacatccagaaaagaaaagaagtattaccttaaaagtagcaatggatggactgacagctgacttctgcaaagaaatgatggaagccaggaaaaaatagaaggctatgaacaacaattgagtcaaagaagaaattaaaacataaattttaaaatatcttgagacaaacgaaaatggaaacacaacgtaccaaaacttatgagatgtagcaaaagcagctctaaaaagaaagtttatagcaagaaatgcctataacaaaaagaagactgaatataaatagcttaatatttcacctcaaggaactggaagaaaaagaagctcagaggaaggaaatactaaagatcagagcaaaaataaataagagagactattcaaaaataattcaaaagatcaacagaactgagttgttcttttttgaaaaaaattgataaaccttcagctagactaagggaaaaatgaggactcaaagtcagaactgaaagaggagacattaaaaccaataccacagagatacaaagaattataagattactatggacaattgtacatcaacaaatgagataatctagaatcgagaaaattcttagaaacatgcaatctaccaagactaaatcattaagaaacagaaaatctgaacagaccaatgagtaaggaaattgaaacagtaataaaaagtctcccaacaaagaaaatcccaggaccagatagattcactgctgaattctacaaaacatttaaagaacaactaataccaaactctaccacaaaattaaggaggaagtacttccaaattcattttaaaagtccaggactaccctaataccaaagccaggcaaggacactacaagaaaacaaaattgtaggccaatatccctgatgaccatagatgcaaaaatcttccagaaaatattagcaacctgaattcaacagtgcattagaaggattattcaccattattaagtgggatttattcctgggatacaaagatggttcaacatatgcaaatcaatgaatgtgaaatagcccattaacagaataaaggacaaaatctatgtgattatttcaatagatgcagataactcgtggcaaaattcaacatcattttatggtaaaaattctcaacaaattagttacagaaggaatgaacctcaacacacaaaaaaaggccacatgtcacaagctcacagttcacacaatactcagtggtaaaatttgaaagctttgtctctaagatcaagaataaaacaaagatgcccattctcaccactcctaaccaacatagtactagaaatcctagccagagcaacaggcaaataaaagacatccaaatcagaaaggaaaaagtgaaattgtctctgtttgcagatggtgtaattttatgtacagaaaatgctaaacgtgtgaaaaaattgttaaaactaataaatacagtaaagttgtagaacacaagatcagcatataaaactccataatatttctttataataacaacaaacctattaaaaaattcaaaacaatcctgtttacattagccacaaaaaatttaatagcttgtgaataaattaacctaaggaggtgaaagatctgtatgatgaaaactacaaaacattgataaaatacattgaagaaaacacaaataaatggaaagatatcctgtgttcataaactggaagaaggaatattattgaaatgtgcataacacccaaagcaacctacagattcaatgcaatctctgtcaaaactccaatgacattttttacagaagtagaaagaaatcctaagatgtgaacggaaccacaaagtaccccaaatacccaaagcaatcttgggccaaaaaacaaagctggaagcaacatgctaaatgattttaaaataggatacaaagctatagcaatcaaaacatcatggtactggcattaaaataggcacataaaccaatggaacagaaatgagaggccaagaataaattcacacatttatagatttggtcaacaaatatttatttataaataattgaataaatataaatgtttatattggtcaattgatttgtgacaaaggtgccaagaacacacaatggggaaaggacaaacacttcaataaatggtgttggaacaaattgcatatccacaggcacaaggatgaaatttgactccgatcttgaaaacagctttgcaaagattatgacagtgacagaagtctagcaaggctgactctgtcttgcttctaacaaatgatccagcaaccccactacttggtatagatccaaggtaagtgaaatcagtacgttgaagagatatctgcactcccatgcccattgtgttcattgcagcattatccacaatcactaagatatggaatcaacagaagcatctatcaacagaggaatggataaagaaaatgtgggatatatacacaatggaatagcattcagcctgaaagaagaaaatcctgccatctgtgacaacttggatgaacctggaggacactatgttaagtgaaataagccaggcacagaaagacaaatatagtatgatgtcacttctacatagaatctaaacaagttgaattcatagaagcagaaggtagaatagtggttgccaaggcaagagtgagaaagaaagacaggttgggagataatcaaagtatacagaatttcagttagacaggaattatttcatgacatctattgtgtaacacaataactatagtaaataacaatgtattatatacttgaaagttgctaagagattagattttaagtgttctcaccacaaaaaagcatgtgaaataatgcatatgttatttagcaaaatgtagcaatttcacaatgtatacatatttcaaaacataaatgtacaccataaatatatacaattttgtcaagtaaaaattgaaaaattctagaatgaataataagaaaaatttacactttgattttgaattacaacaaaaaactagtaagtaaaaaagaagatagaaagttaagtataaatgtcagaaagaattatcaaactagactttataaccactgaaaataacttttaagagattgggccactgcacaaagcaggactctgtcaaaaaaaaaaaaaaaaagagtggaaagttggttccacttgtgataaagatagagtaacagaaactgaatttaccttctggccttaaaaattaaaaacaaaacaaaacccaaaatttgtatcaagcaaggtattttagacactggacaacaggcagctcaggacaatgattcccaagtggatacaaacaaatgaggtgacccctacagtagcttaagacaaagattgtcagagtgaatttaaaaatataagccaatacttatctatactctatctcaaagaaccaaactttatataaatgatagccaaggaaaattataaaatattttgaactgaatgaaaatgaaaatcttttgaactaaatagacaatatattaagatgtatgggataccactaaagcaggtattaaaggaaaatttgtagcattacattctagcacaagaaagaagaaatgtctgaaattaataacctaagcttacactctaaaaagctttgaaagctttgtctctaagatcaagcttccactctaaaaagttttgaaaactttgtctctaagatcaagcttccagtctaaaaggttttgaaaactttgtctctaagatcaagcttccactctaagcttaggttattaatttgaggttacttcctggagagtttccaggtcatactgcaagaaagggaaatccaaagagagctcagtgagctccctgagttaaggagacaaaattttcaagttaaaaaaagaggccagaatccacagggcaggatacagaataaaagatttctgcacaaagagagttctggagatctggagagagttctcctcaattcttcatctcagcactgatcagcatatttgtgtgaggaaaatgcacaaagccagggaaaaaccagaaaggatcacgttttaaaataataaagatcacatatagctagaaataattcaccttcacagcagccaaagtggagaagcttcaaaacacacagggctttgggtggagcactcagaaggtattgcctcggtattggagctataggagccctagactaaaggctgctcctgcccagtctaacaaaggttaagagtaaggatatgaaaacagtgattattagtatgttgcatctttcaagaagacaaaacaatgcatgagtatgttaagaagagacatggaagatatttttttagactgaagtagaaaaataagtacactatccaaaacaaaacacagaaaaataaaaagactgaaaaaacttacattgcaatgtggaaaactctaagtggactaatattgggggcccagaaagcataagggcagaaaaatatttgaagacatagtggctgaaacttttccaaatttcatgaaaattgtgaacctgtagattaaatgaattcaacaaaacccaagcacaataggtatgaggagcactataacaagatctaacataatcaagttgcttaaaccagtgataaagagataatcttaaaatcagccagacagcaaaaaatacattatatacagagaaataaatagaatgatagcagttatgctcaaaaagcatgcaaaaataaaatacagaatataaccattaaatatatatgtcagaaaacagtacatctttaaagcactgaaagagaaagtctaacctacagttttatacccagtaaagctcttttggataaataaaggtgaaataaaggtctttcagacaaagacaagctgaaagaacttatcatcagaagactagtatcataagaaatgttaaagagaaaatccttcaggaaaaaaaaactgataccaaatagaaatcagaatctacacaaaggaattaagatgggaagagtatgtatgagggtgaaaattaaaaacttttcaaaagttttgcaaatcttttttagaagataatcgattgtttaaaacaaaataataacaatgtataatggagtttataacataagcaacatgttatcagagtaaaatatattatgacaatagcaaagagacttggaaaggaagaaacagaagtgattgtgtaaggttccttgccataagaaaagtgttataatatcatgtaaggcagagcatgataagttacagatatagtctgtaaaccctaaagcagccacaaaaatagcacaacaaagtgttatagctaataagttaacaaaggagatgaaattgaatcatgatattttcaattactacaaacaaagaaaaagaggagaatgggaagagaacaaagaaactaatagaaaataattatcaagatggtaaatttacacatgactgtattaataatcacattactcataaatggcctaaacactccgattagaaggcagagattgtcagaatagattaaaaatataaaaaatacacatctacactctatctcaaagaatcatacttcatgtaagaaacaaatgggttaaaagttaaatgatggtcaagggaagttataaaatattttgaattgaataaaaatgaaaatcttttgaactgaattaacaatattttaaaatgtgtgggataccactaaagcaagtattagaggaaaatatataacattaaatgctaatacagaaaataagaaatgtctgaagttagtaatctaagctttcaatctaagaaattagagaacaaaacaaaacaaaaacaaattaaaccaaaggcaaagagaagaaaataaataataagtgcagaaataaatggaattaaaaacagaaaaataatccagaaaaaacagaatcaaactggttttttgaagatatcaataaagccaataaacctctagccagatgtactaaggataaaagagggagaaagagagaaagagaaagagaatctcctgtatccggactaagaaggaacatcattacagaccctgcagacataatagtaatcataacaataaagattagcctgtgagtaacctgtgtctgaatccacaaggagctagtcaatagtttagattcctggggcccatcccaatcataatgaataaaaatttcagggctaatcagaagaaaggaacataataataatgataataataatagggtttgacatttttgcaaacactccagatgactgatgcaaagttgagctcaaggtgcactgccttagattaaatagagtcagctagtctccaagattcatgactaggaaaattaaaaaataggtcatgctctactgacttccctgtgaagtctagatctgcactgtctagaaacaacctgtcagataaaggggaagctgatgtgaccaacaatgacatacccatgaatttaagactctctccattttctctttacaagttatgcatgttgaaagtgaagctcaaataggtggcaccatcccaggcacatattccaagaagcaaaagactaaaattgtctgccacaataaaatagaataccacaatgatacattttggtatctgtccacaaaaccttcttcaggttctgcctgattactagatttctaactgtaacataaaccccttttcctggaaaacaattgaaagcaaggaagttaaaacaatattatgtgggacaaaatataagtctgcttgacatcttttaagtaaatcacatacatacgtatttgactctcattagtgacaagtgattcttaaaacttagaaagatgctttagctaatcacgataccctcactgcaagctcacagcagccaaagattggcctatctgctgtgcagagaaggatattctctggtcacagcccactcctcaaaccccaggggttcccagtggcccaggccgaccagcatactggcatgatacagcctattacataccgtttaaataaagatttgcaaggaaaatgaattcatggcaacattcattattgatcattctcaaaactgtctggagaattcccccagagggcttagggaagaaattaaacattgttttcctgaattgtttcctgctgttttcccacttcactggttttgctcccgtaattgtgtgtgatcctatagccacaaattttaatatgcctgaattatttcatacagcttctggatcacatgtcaataatttgggtgtgaataactataataatgatgttaataataatcaccatgatgaggaaagatccttagagttccctgtttactgttatctcttaactctttaattacgttttgtctgacctaaatctactgcatcaaaatctgcaagtaataaattccaagttatttctagtctcacctgcccacccttgaccactgcctctttcctggagctcattccccctttcttccccctactattggtctcttatggttttccttctatttctctgaccttctagatcctcgtcaccatttttatgagttcagaaatttggactttttttttttttgagacagagtcttgctctgttgcccaggctgcagtgcagtggcacaatcttggctcactgcaacctccacctcctgggttcaagcgatgctcctgcctcggcctccctagtagctgggattacaggcatgcgccaccaccccaactaatttttgtatttttagtaaagacagggtttcaccatgttggccagggtagccttgaactcatgacttcaagtgatgtgcccacctcggcctcccaaagtgatggaattacaggcatgagccaccatgcccagcccatttctcagaattctaatcagtgttttctcatgtcatttcaaacactctccttagcctctcacctccttgcctagcttcaaacaacatcagtctacatatccagaattcacatctttgatgcaagactccaggtgtcatgcctccacagctcagttaaccatctgatgtcacctcccactactgtctcatgtgccctatgctcccaaaccaactcctctgctcacggctcagccagctttcccagtgcctttttatacccacagctttgacttcctggtccttcttcctaaaacgctttgaaaaatcatatccagcagtatatcaaaaacagcaaattatccattatgaagtttgtttaattcagggaaagtaagagtggttcaacattagcaaatataattttaatataatttaagatatcaaatatgacaaaggaaccaatatatctattgttgaggaaaaaaaattgaaaacattcaatcgtcattcctgattttttaaatgtatagaatactgaatataaaatgctaacttccttacatgatttaaagaaaaaaacctgtcttgaaccaatcttcattcattatacccaggaataaaacatttgcaacatcccttcaaagggaaaatctttataagaacattcattatcaccaccactatttaatatttctctgaaagttctatctaaagcagtgagacaataaaattatgtacaaaatataaatgtaggaaagaaaaaacaggggttgatatttatatattttatgattatttcccttaaaaaattatctaaaaatctagtagagctaataatataatttaataaggtgtccaaataataaatattaacaatgaatcactttcatgaataaaataatgatcagttagaaaatataaccaacaacctatcagaatgaccaggatcagttggggtaaaaagaaaattccagacagaaatactctatctatctatctatctatctatctatctatctatctatctatctatctatgttacctatgtctgaatccatccacccatccatctgtctgtctatctgtctacctatatacacacagctaacccttgaaaaatgcagtggttagggagaaccctaaccactcaatcaaaatccacttttaacattcaactcccccaaaacttacttaactcctaataccctcattaatctatctatctatccatccatccatccatccatctatccatctatatctatatatctatatccatatctgtatctatgtgtatagatagatatacacacacatatagctgaccctggaacaatgcagaagtcaggggaccaacccctcacacagttgaaaatccacatttaactttcgcctccctgaaaacttaactactgatagcctgttaacccaaagccttaccaataacataaacagtcattattttaacacattgtctagtatctacatatattttacccattcatgacctgcctttttcttgtttttttcaatatttctagagtacatggctcacctgtgggtttctttttcaaattgttgcaaatctcccctaagtttttcattaattattgaaaaaagaatccatatataaacgcatccatgaagttcaaacccatgttgttcaggggtcaattgcatgtgtgtgtgtatgtatatacatatatccatcacatatactcagatataaagatattcatgccaagattatttctctattcatctgaatcatgactataaaatttttttgaaaatacgataaatagtaaaggattttcacaaaagttcttccaataagttggtttgttctgatgagaataaaataacagctttatgttggatgacaagtttaaggccaatgaattatgcactttagaaggatgaatttatgatacgttaattatatatcaatacaaaattttaaaattaaaatactacatgtactacctctaaagaggggactgcttattctcacatggcattctgcttacccatgcatagggcagcacagacatagacacatacagctctacgtatgtgaaccaactcaacacagcttcccaacttggtactggcaataatgagatcttcaccttccatgcaattccccatggtacctggtagaattccactttatacctttatataagaatctcactttataactcatcctttgacatcttatatggccacacgccatgctcattcgtgtgtgaaagtgcacgtggtactatgattttttgtaccccgtagtgccttctttatgcctctccgattctgttttgaggaaacagaagctctgagaaggcaaggggcttgcccgagttcacaagaatagcaacttccagacctgggacttgaacctaggtctctagattgcatgccacggttgacgcagccctatggccccgggcatgcgcttctcttcttcctacatgaaagccctccttacaagccttccttgtaccctatggctccaggatctggccccttcacctccccagagtcagagttaccacggtgcagtggcgcaccagtgggcctccggcaatgctgctcccgcttcccaccttccagtggcacttaccagagacacccagtggtaagaattaactggggaatggccctgcccctgctcaggccagctaaacagaagcatttagagcagcaaaaagggcgctttcgttctgaagaccccgcaggcccttccaacgaggccagtttgggaaggagggcatccccttagtggaccttcacagccacactctcgacattggctccagagaatccatgacggggaaaactcatgaaagcctggacaacagacagagaaatctagccacgtgattctgaacacgaattcaatttccaaagattatttctagggggcgtaagaacctgaggcgcaccccgaggaggccagtagtgagtgatgtcagacttccgaaagttctatgtaaagcaatgagacaataaaagtaagcacaaaatataaatttaagagagaagaaaaaagtgttcattatgtacgtattttatgattgtcttcctaaaaaaaattatctgaacatcaattagggctaattatagaatttaatgaggtggccatataataaacattaaaaattaatcacttttgtgaagtaaagcaatgaccagttagaaaatataaccaacaacataggacgatcaggaggagttagggtaaaaagaaaattccaaacacaaacacactatctatctacccatctgtccgtctgcccatccatccatccatccctccatccgattatctgtctgtccatccatccatccatccatccatccatccctccatccgattatctgtctgtccatccatccatacatacatctatctatctatctatctatctgcccatccatccatccatcatccatccatccatctatccatctatccaaccatccatccatccatctatctatccacccatccatctgtccatctatatattcatctatctatctatctatctatctatctatctatctatctatttatctatatctatctatgcattcgtccatctgttcattcatccatccatccatccatccatccatctatctatctgtctacctatatacacacagctaacccttgaaaaatggagtggtcagggaggacccccctcactcagtcaaaaatccccacttttaactttcgactccccaaaaacttacttaactcctaataccatcattaacaaataaaagcaagcaaatttgaataaggtaacgtttgggggcatatctaactagcaaagatgtcaacagcacccaggattgatgagagcacaggaaatgaacactctgaagggaaataaaagtccaggcaaactttctgcagtggtcccattgttgctctcccaggaatgcgtccttaggaatggtcacatgtgtgcagaactgaatttccaagtccgtctagtgttgcagtatttacagttgcaaaaagccacaaacaatctaggaatctaacagaaggggttaaggcgactaaactagtgggtggattaatagaaaaaaatactgtataaccatttttcttaatgtggacctgtgttcatggactcagaaaaatatccgtaatataaaattaagggagagaagaaggctgtaaacagcacatgcgtgagccctttttgttttaattaaaaattacatatataacatatatgcatatattatattatattatattatattatattatattatattatattatatatatttatgtatttgttcttcttggaaacaaagatgtcaatgaatgaataccaaattactaacaatggttatctttgaatttattttcttttctcttattcattctttctctctctagatttttcttttattttttgagtgtctgtgtttcctttctatgattatttttatatttataaaaatatgtaaatatttttacatatatgtatatcagatgagctttccagaaccttctgccactctcaggaaagagcacgctgaccaacagcgggcgcaggtggaaagtgaaggctcagagcattgctctgagacttgtcctgggaggctcctggtctcctctccagcttcctgctcacagagaggcgaggctggctcaggccccgacggtgacgctgacgacggcgacagggaggtgtgcgaagccgggcgcgagctgtgccagctctcgctaatcctctgcagtatggttcgctgctaatttgtcatggcacatatttgccttatgtctaattagcatcaaattgcaaactgctatttgctaacaatttgttgcatcaatctgcttgaaaatctatagtttagaattggattacaacttatcctgtctatcaaaattctagttcacacatacacaaaataacttccccttcccgccaaaaacgtcgcaatgtttgcagtggcacaaaaggagagcgatgtgtttttttttccccaaaagaaagaagaataactatggggtgtctcattttgaatgtcctggctttggtttcccatggcctgggaaaagagctggaatagtgctcacactcaaaaagggtgctccaggcctttctcagggactttccaggaaagtcaagacataaaaaaggcccagaagcccagtcttctcaagtcccagacatagaactcccaggcaaaattgtgcaaagaacaagcccatacctgctgagggacacaacctcaccccagggttttgcctgcattcgctcacataatgctagcaacctcctaaggaagtaggggttaacatttttcttatttacaaattacgaaactcaagttgaaaggctaaatcactcaaggtcacatgtgtggcaagtggcagcacaataattgaagcccaaccgtgatgtttcattgctaaggtgaccctctaaatatcaaaaaataggcagtaggaataacaatgatataaaaattataaaatgagatataaataaaaataatagaaaatgaatgaaataaaaaggaaataacaattaatcattgcatttcacttgatagtttggccttatggagacatcatctagttggatgttgaagattttggtttggcaacatgccctgtggacagatggaagactccgggcctcacatgctcatagccttctcgtggtctcaaaagctacctcctgtggtccatctagaaggaagaactgagataaactccctcgcagagggacgatgcctatgggttccaaagagagtcaaaaggtgacattgggttgagacatcccttctttcctgtttcttgggcaaggagagacatgtttccaacagatggaagttggagctctattgcagagcacaggcacagaagtcgttacattcttagcccagtagctagttgactaaagatgtgccatccattaaaactcattgacctcacaagtggtgaccaaggggcaagaggctttcatggtgtccactccagctctccttggcacccccaaagaacgactttgctttgaaaaacaattcataaaatcattgttattattattataaatattcaaaacctagctgaacacagtggctcatgcctgtaatcccagcactttgggaggcccaggtaggcagatcactggaggtcaggagttcaagaccagcccggccaacatggtgaaaccccatctctaccaaaaatacaaaaataaaataaaattagccaggcatggtggcacaagcctataatcccacatacttgggtggctgaagcaggagaattgcttgaacctgagaggtggaggttgcagtgagccaagattgcaccacctgcactccagtctgggtgacaaagtgagattccgtctcaaaaaaaaaaaaaaaaaagaaatcaaaacctctccttttgtagcttctcctaataatcctttgggctggaaataaaagatcatctaagagcatcttcaaaaaagacctagagaaatcacaaggaaaatttaaaaagcagttatcttccccacacccacgaacatggtcagtggccatgagtttgatatgcaggactgatattcctgcgaaagatgtttgtggagtacctgccagctgtcacaacctgtgttaggtgctgaggacatggaaaggagtagggtgaaccaagccatcacagaacacaggacgcagaggcatgaggaaactcaaggccctaagacgagttcttgataaggacaaagtctagtgaatgcacgtcagtctagagacagacaaacagagaaggcttcctagaggaaaagatgcctgagctgaaacacaaggacaggtgcatgggatgaaaggatccttccaggctaagtgatgcacatgtgcatgccattccccaggaactgaagcatctgtgagttgcagaggccaccccctggatgagcagtgtcaaggttgagaccagggtccccagactgtcttctgccagttgaggaatcccttccaaagagcagggtcttaggatgcctgtaaaagacatcctttctcatctcccttgagggtaaatcaatctctctgttgagctcactagaggagtcaagcaaaaggaagaaagattctaagccaactcagcaagacacaggaagcaggttaagaagctttcttcacttgtgttcttggaatgactctttcacataataagatgttcagtgagggtttgccccatgccagattcaaatagaaatgatgctaccagcctctgtccagatgcacgtttctctatattttgaatggaaggaggccagacactgcatagatctgtaaccagcaaggaagcaaaccaaaaggtgcccaggaaaaacaaataatccccaaacagttgcctccagaaggaagaagttcatgctaaagaactgtgcttggggcttgtgtgttcaaggccagtcagtggggcagataaaccttcagcctccccccaccacacatagacatacaagctcaggaactaggacaggcagggaacttggggttttgaggcagccagagaggatgatcagaagagctgtccagaggctagacacagtcgtctccccaggacaacagggtcacccttgctcagagcgtgctgtgtaaaatccataccataagacttcctttgccagcacagcagagtgacagcaccagccagcaagcccaagacatggccacactgacctggcatcctagaacacaaagccagtatgtcctttaatcaaagtctgagtaatctctttggattcagtttaagttagcctgttctctcactactataaaggaatacctgagactgggtcatttgtaaagaaaagaggtttaattggctcatggttccagaggctgtacaggaagcatggcgccagcatcagcttagcttctggagaggcctcagaaaccttacagtcatggtggaaggcaaagggggagccaacagttcatgtggccaaagcaggaggaagagagagaggaggcaggtgctacacacttttatttttttccaagatggagtcttgctctgttgcccaggatggagtacagtggcactatctcagctcactgcaacctccgcctcctgatttcaagcaattctcctgcctaagcctcccaagcacctagtattacaggcatgcaccaccaggcccagctaatttttgtatttttagtagagacagcgtttcaccatgttggccaggccggtctcaaactcctgaccttgtgatccacctgccttggcctcccaaagtgctgggattacacttctaaacaaccacatcttgtcatgagagcagcattaggagatggtgttaaaccattagaaaccacccccatgatccaatcaccccccacctggtgccacctccaacattggggatagtgactgaacatgatatttgggtggggacacaaagccaaatcgtatcaggcatccaaaaacagcactccttagaagccagaggtactccagcctgggcaacagggtgagaccccgtctctacaaaaaactaaaatgcattagccaggtggcatggtgcgcacctgtagttccagctacttgggaggctgaggtgggaggatcccttgagccccagagttcgaggctgcagtgagctgtgatcatgcctctgctctccatcctaggcaacagactgagatcctgtctctaaaagaggaagaagaaagccagagatacaagcctttcaatgacccattagcccacctgtaggatccgctatatgcctccagatcccagcagaggactgagaggtggataatctcccggtatttgtgtgtgccacttttgtgtgagcaaagacccaaggttgcaacaacagtaggtgtgtacacaaaaaaggaccaggtccatactggtgcatactctccttatggcattaaaaagggacatgctgaatcctggacagaaaggaagaggccccccagaactgcctccagtagggccagcctgtgttgggggccagcccagcatctctgcgtcccatggcatgccccacagggggaccacctttgtgcctccctgttgccagtaaagcacactgatctttaaccttttcagcaactgcaagacatctctgggacctccacacagctcctgtcaaaatgtcgggctgctaactataaactttattttgatgtcttgcttttcgggaataattaccttgtacctaaaatgttagcctatttactgcttgtgcaaaaagatgacaataaaatcaatgttgcacaattccccaaagtgcatcaaagtcttttgcaatgttaatggactggcaggtctgagaggtgtgagctcatgttggcctgcttgggcccccagctctagcaggagaacagctctctcctcatcaacctgcaagcccttgtctgccaaatgtattcattctagagagttggctcagtccctggggtgagagaatgggtgaaatgggggaggggtgatgagagcagattggcaagtacatgaagtcacaaactgtgtgagctgaaagacgcttgcagggactgacatatccaattccacctcccagaggcagggaagcagtttcagagagcgggagtggatcccctagggccccacagcagataaattgtgatgccagaataagaatctatatctccatttttattagtatttttttagatggcgtctcactctgttgcccaggctagagtgcagtggcctgatctcagctcactgcaacctccacctcccagattcaagtgattctcctgcctcagcctcccaaagtgctgggattataggcatgagccgctgcgcctggccagaatccatatcttctaattcctggtctaaaattatatcatccactctgctctttgggggactgaatgatttttcctccctctggcattccctcctagaacatagaccaagtgatgtcttcaggcaggagggcagctaaacagtgtctactggtcatgtagctaatacaggcaccatgtcctaagaagtttggagaaggcatcataaaaaaataaaaattcagttccatgaagtcatagtgtatgccggtaaattaaaggttctgagaagtcttacaatttgcagcgtgtttcgttttgtttacccagcatttctaaagtgtcttcaaataagttattttggtggggagaggtgcgtaatatcggttggagaatttaatgtggcaaaggcagccttaaatatattcaccagcatcacactggtttttttgatggctgtggagaggcaggccctacaggaacaggtgtgggaaagtctccgtgtagcatagccaggtgaggacaagaaacaaaaagaggattggtgaaaacagactccactatgccatcatctacagcccagggcagccagatgtgtcttcttgtcttgggccattttgcgttgctataaagaaatacctgagggtgggtaatacataaagaaaacgggcttatttggctcacaattctgcaggctgtacaagcatggcacgagcatctgctcagcttctggcgaggaatcttccagtcacggtggaaagaaggcagagggggagaggtgtgtcacacggtgacaaagaaagcaagagagccagactcttttaaacaactagctcgtgtgtgaactaacagaacaagaactcactcattaccatggaaagggcaccaagtcattcatgaggaatccaccccccatgactaaaacacctcccaccaggctccacctccaacattggaggtcacatttcaacatgagattccaaggagacaaacaaccagactttatcacttcttctcctggcatgtgttgggggcatgggtgggctggatagaagccgagtacaggaacacagaggttggaaatttgcaaaaaaaatagctgtagcagagcaccaaccccccgcccccagtctgtccagtctaagatcacatttgactgaacaaggtatcggggaagggaacagtggaaggcagaagatgggacccaaaagtcatttgggagggagcagtgcagtggggctccacccaggcagagctgatcctcaggcagctctgggtatctttgtgaagacgcagaggcccaaggcccaagacgcagaggccctggtgtgactgcagtggtcactggggctacatccattgggccttctgcagcaggcccggtgcaaacggaatgtgctctctctggggactgacttcatgcaatgaggccgatcccttgagaaaatggacaaaccctgtgttgggcagaagtggcatgcctttggcttggttttcatcttccattgcagccttttgtggccgcatcaagagaacaagctggcgaaacaccctctttactggccattttcctttaaccacattcctggacatttttaccctagaagtctgcccacctctttgctgctggctcaccttggtttggggattttcttgcagcctttcccataagctcagcgggccactctctgcagaaatgtaactctgcatctaagacgtaactgttaaaccctaccttttggtttctgtccccaaaaccaatgtattttaatgcagatgccctgcagctcaagggtttttaacaatttttggagggaaaaatgtcacacagcttttgaaaatctgccatgagacctactccctgaattctccattcgtttactcagaaaaactcaattgaatcagggaggcatgattccccattagaggaatcattttttctttcctctggtgggttagatttgtttaggtgttcactgatccctcacttgattaatcaccccagctgccttctccttgctcaccaggtggggcggtgaaacaccagagtggcatgagggtcctgtagtcctgttgccatgtggggacccactgcatctctgggacaaaattccaccatttttcatttgaatttcttcaaagctcccaggtatgagccaattccagcttatttccaaattattgtagacttatctgtgaatatacttcacccccatttcctgcaatctacatgctcagccacacttgaacaaatccctccagtctgccttcctgaaacaggattggatgagggaggctctgggaaaaagcaaagagagagaccacaaaaaccaacaggaagaagaggtggaagaatcaaggaaggtggtgacagtttaatccaagatggtagaaatgggagatgagacggagaagtagaagagagaaggaaaaggcatagtcagagagaaagagaagttttcctgttcctgctcctacagcaggtcccggacccaggcatccatcaccaggcacatgatggaggaactctgtccccttacctatgaccagcagcgatgttttttcagtgattccgcaagagtcaaaaacccaacaaagcgcatcgccggcgctgtaaagggagcatgctgccggtgtctgtgaccactgtatgcaaagcttggcattagtcacagccgggccggctgtgacaggcctgaagtgagggagattaatgcgaggctgggacactttattattgtcattctgttctttcagactctgcctctgactttcaattttgctccagaattaattgtctgctccctgcagtatgactgatggagaaggatatgcggagcccaggcacctggctctggccttgacagtctcaggcccggtgtgggatggattgtgtgcggtcagggcgggggacagacgggcatccctcaaagaaatcggcccaggccacaactgacttcaatcagatgtgaccagagattatcctttgccaagaatcattttggcttgtagggttcccagcaacctgcccattccctgtcatggaccctccctggaacccagagctcagtctgttggtggagccattcctagtctttcaggtttctgattctcttcctttttttctggttctgggcaataaattagcagtgcagtctcctaggtctcagccctcccagatgtaagcatttttgtgagcatgtcaagcacagaatctctgacaatgggaaacgcagtgggattccaaaacgctggtgccattttccagttggcgttgaatacccacctccctcttcctcattactcacccttgccccattttccttcatttcaaaaaaaaaaaaaaatcaaatcatatatttaaacagaaaagtcttccttaatagcaaatcctgaaggaagcctccaacaaaatagcaatgttctctccgctttaggagtttggcacacaagaaatggttgttgactgaataaatgaatgtgtgaaggcatgcaagaatattttcatggataaatgaataagtggagttcctaaaaagaatgaaacatagaaaggcatatcttccttttacaaataaataaaaatcctttccagtcatttttaagccaaattcagctgctaaccatttttctaaactttggtcagcctcattccccattgcagatatgttcatgaaaacctaggtgtaattctttaaaaaaaaataaatggaatcccactttaaatgtttaagaatgcaggggaggagggaaaatgtctttgagaaatacatttccagtgctaatttttatgctctggtctagctgtgtgtgtgattttcaacttggggtctagaggtgacagtttcaatgcatgagatacagatttccctagccctcccaaaacaaagtttcactagaggaagagcttatgttttccaggcacctctccctccaaactggataagattgacacgtgagatgaggaaaaaccaaccaataatagaaagggcaagtgttgatgagctgagaaccatttaaaggctggttttctgtagaactttcaagagttccttctaaatatgctgtctgcctataacctgcaataaattactacagctttaactcatctggtactttcatacgattacggtattatgttaaagggtacagaaatatataatatgctcaactgtctctatagttgataccagagggaaaattaccaccactcagtgaagaagattcaacctcattacattaatgatttatcacaatgggaaaatgtgaaaagtaactagttgcttttatgaaaagaggcagcttttcccactggcaactcctgcaggctctccaagaaggagaatttagaaggagctccagacggtcacactctcccactcccttccaaagctccctctgcaacatgaaggagaaggtgcactggcaaatgttggaatatccttcaaacttgacattaagtattcaaatgttacttaagcaaagtgtgagcaattaaattaatcaatcttcccagccatgtacagaacagatgttcaataaatcctctttgcttacagtgagggggggaagagtccacttttaactgtccttcagcagtgacactgctcaggcgtcctctgccggcctcctgggctaccgtcaggtgcttctgctgcactttcctttattataaataacaacaggccacctggactacctgtgctacctgggagcctcaagtttaatgatccttccaacacagggctctgctcgcgcctgatcccaggtaatggggctgatggaaatggcagtagagtgacggttggcagtgacagatgactgctggccaacttgtgctgctgacaagcggtgaatatgggccaatgttgcagaaaggtcaggataaaagtatttgctcgactttcaaagtttctccagaaaaaaaataagcagatgagccaaaaccacatagacctccaacaagagtgcaaagagctttgcaccagaggggctggcttgttctgggctctagaaaagaaggcagtctccattggaagctgtgggttagatgaggagagaaactcagacactagggagagggagccttgttttctttgcatgaacagttcccagtgaggaacttcacctctgggctgccagggaacattgagggaacgttcagtaaacaattctctccctaacccctcaagatgatcatatagagtctccctgttacatcacccagaccctctaagtatccctctttgccaatactctgctgcagaggcagctaacctccaatttacaaaataataaaatcaatgaatgtgccagattaccaaagatcacaggatttgacctgtccactgtggcttctctaactaaatctaccatcctaaaggagaggactggggaatcccaaagcatggggaaggcactcagccctaatcccacagtgccaaccatcccctggtccacccccagaccaggaccctgcccagccagaagcctctgatcaccacccactgaaacccacaaggccactgtcattcagaagtggaggatacaattcctgccctacagatacataacttcaaccttttgaaggctgcctttccatatatggactttatccacattttaatgaggctttaaaatctccaagattaagctggtattttatgtagaactgcctgctttttatgatatcctgacatgttgtacaacatttggtgactatattgatccttataaattcagcatctatatatattcatgaaaagtaccttttctccccattcgggccacaagatgatccagacacacattttcctgagtggagacaataaaactgcaattgtcatggttttgagcgaacacgatgtttcagtgttttcaaattaaaccccttttaccatctgcttgcaaactcttcagtgaggaaatgacagctcctttctaggtatctgatggtgtaagtgcccctgaagtttctccttcaggtgagcttgttataaatcctgaggggcccggcaagggtttcctcccgtgtgggacattatatatcttcatgccctcatgtttgcccgaccagaggccaaccttctcccatttctttgggccattttatgcttttaatctgaaacaaatgattgcaggggggagaaagagcattatcaccttggcgaaacatcgggaatataaaaaagaaaaagaagaagaagaggaagaaagaaagagactatgggcaaattcatcttctgccgctacaatcaatctctcacctaaagaaatacacaataactaggcaggaaagaggcaagatttatgacttagaaacatctacactgaccagcatatacctagtcttcttggctctctccctacccgaatggctctctttaacagttacaatgataaactgtctctccctactgttttacaagtacattagctttatttaatgagatctcagagtaatttaacagatgtatataggacataagactagggaaactcttgctactaggatacttttgccaaggtattctaggacagctaatctgagagatagctttatattctttgagaaagcattgtttggaaggcttttaaaaatgattttaatggaaatattatattacaatcaatgaggagagagcctctttcacattcacttgcattcggcccatgaaaacgcaggatgaatgggctttgtgaagtcgtaggaactcacttacatattgaactgtcaggaaggatgtcaccatcagaaattaatacttgtgttaaaaaagttaatatttcacccacccaccttccaaaaagagtaagaagatacctgggtgtgaggaaacggagagagggtaggcaaagggagagaggaagagactatttgagaaggaggtgaggcacctgtttcagccaatgtcgtgtttcggggctggggtcgagggttggagacaggtgcagtttcctccctaccctctatccctctgtgcctggcgtgctcaggccaggacctccccttcctggctggctgccttcttccttccctgacattccttaacacttggttctctgagaactgtaatggagaaatgacaatggtattaacttttcaaaaattgctttaataaactgccaattaataagtgagaagaggaagccatgggaaattacctggtcatgcttaaaataaaattaaagggggaaggggacgtttttcctcttcctttctcagaaagcacaaggcttgggctctcataccccaggatgtgatttccagaaccaaattctcctaagtatgacaaaatctacactgcatggcaccacatcttggtctatgatacagttaactcagcttcaaaatggagtgtcatcccaagtttagtaaatattggcaatacaatacatttaaaaaccaaaatggaacaaaataacagcaactcaaaatttcacccaatggggataccagttttaattattagtgactctttttttttttttttttttgagacggagtcttgctgtgtcaccgaggctggagtgcagtggcacgatttggctcactgcaacctccacctccctggttcaggcaattcccctgcctcagcctcccaagtagctgggagtacaggtgtccaccaccatgcctggctaacttttgtatttttagtagagatgggatttcaccatgttggacaggctggtctgaaactcctaacctcagatggtccacctgcatcggcctcccaaagtgctgggattacaggcatgagccaacacgcccggccaacttttttttttttttttttttaacaaaaatggtcttttaaactacaggttgcttttggtcgaaaaatatttttgttttttaaatcctttaaatggtttgtaacagactgcagttgatatttacaattctgcaaaagtgtggcagatccttctccttaggattgctagctccctcataggcacctttatatggagtcacctctgaaagtatagatgttacagtgtgtatgtgacagcaggtggaagtgagtgcaagagctacatgtgtgtcttctcaaggtaaacatacttaacaacatcctaccaaacatataccactttatacagtgttcatggctccttatgaataatttagggtatccaatgcagtctttttaaaatacaacattcacagtgagcataaaaactcagtccaatgaaaggttatgaaattagtggtgactgtacaaaattgcaaagagaaatcacaatgaacctactcacttaggaggtgaggggctcagaaaaaaaaaagcggggggtaagagagagagagaaagagaggcagagaggtatgtggtgttcttgcaccaacggggcaagaacaaatctattgcatagaatttcatttattgagagctatacatcaagttgtatttgtttaatgaggttggcaccagaaagatgtatagaacatgtcagacacccagtaccaatgcgtagtggggaaaagataacatctcagactgcgaccactcgcttcgtcttccagccagtgtctctatctgtcggctctttggggaataataaatgagggggcagaaggaacaagaagccaaataatgaaaaacacacacaaaaaggaaaaattataacatgggagagcaaagtagagccagatttactgacctcacaactacataatcaagaaaaagttatcactgaagaaacttttactaagcggagtgatcttaaataacagggagtcctgtgaaatttacagcgctcttaagatatgcaaattgaatgcaaggtatagacataagggtaattaattgtaaatctaagaataatgtttctttgtcaggctgtctccctgttgtggaatacattctaatgtgccttagcttggaatacttttttcaaggctgctctaattacaagatgttcagaatttcaaaatactagttattcttatcgtttaatttagcagctgtaacatttaataacagaatttactgattgcatgacaatattgtaatctttcaaggttaaagcgcttgttcccaagtccagcccatcaggatccatgtgcagagagaatgttatggataaagcactttccacaggtcctcaatgagtgttgcgggtggaagcgtcgcaggccagctgagcccaaaaatggggcttagcccacagggttctcggcttcatccagaaaagaattcaagggcaagccagtggtagggtagaagaaaacagctttactgaagtggcagtgttgcagctccgtgactgaccctgcagagcagggctaccctattggcagtgtgctgagaccagcagctcagggcagttttgcagtcatatttatacccacttttaattacatgcagagtaaggggctgtttatgtagaaatttctagggaaagggtagtaacttttggttcatcaggtcattactatggaaaggggtggtaactcccggctgttgtcatggcaacggtaaactgacatggcgcaccggccagcgtgtctgatggaaagttgcttccacccaggacctgttttagccagtcctcagtttggtcatgtgcctgagccccgcctccagagtcaagtcccgcctcctgcctctgagagatcccagtggttgctcactgctgcttagttgcctcacttcatccactggcacgtgcttctgggtcttacagtgatttccttatcatgctgggaacaatgtactgatttgtgctcttagtgtttagctctcttctacctgcccgtgaaaacctcccacttcttgttaatgaaagtgatggtgggattctgcagatgacggattcttagaaaattataagcaagaagacagggatagaagttttcaaatcaagggaacgtgactcttgactgtcatcaagaaagcttggttgtcgtcaagaaagctcttagtgaagaaccacttgaggaaagagctgggcaagaaggggtgtgaggggattccaccaagcaaataaggagtgacggtcctgctcaggaaggagaccactgaagggatgggatgccgattccatcttcaatcgtttctcagaaaacatttggccaagagtggactacacaactagaaggtctgggagtggagaagtgggcacgagattggcccaaggaaagtgctaggaaagatgggttaaactctctcttgggttaaagccgcaagggcagggggcccaggcaagtgctctctcgccctgaatgcttgggctgtgtgcatgcctggctgctatgacaacgcccactcttgccctcctcctgctccactggcttctcctctctgcctcctccacttgctcctggtctattcaatttccttaagacaaacctctgatgctcccctgagctctgtctggggccctttcctcctttcccctccacactcatcctgcaatcccatccagtcccaaagcactaaatgccatctctgtgggttgactgccctgaaatctccagcccagaccttccaggggcttatagcttcaatgacatctacttttgaatatctggtggacatttccaaactgctgcatttcaaatggagctgcttctgccgggaatgttctgctcctactgagagaatcctcaggctttgggtcacagctcaggggtcagtgtcctcggctcactcatcttacgcagggtgcctccctcatttctctgtcatatcgcccttacttatttccatcagagaaacttacacaatttatattgatttcaattgcatgtttattttatgctgcctgtgtgatctactaaaatcgaaactgaggtgggatggggaggacagggggcctcttggctgtgtccactgctctgatatctctgtcctgctgtcaatggcaggtgctcgatagatcaccagtgagtgaagtgctctggttaccaactcagaaagacagcgtggtctgtgcctcttcctaggactccacaatagccccatagtgaaagtccactgcatgcagagagatactgcagatagacagcatatctaggcatcctgtgcccatccctgggcatctcagttgagaaactgaagctggatcagaacagggctgtgagaacagcaaagagtttggaaagtaagccagtcaaggcttggtgttaggagacccagaacattgagcctagagggaaaggatgatttaacattttatggcacttatttactagatagtctggagggagagggatttaaattgctcagtacagctgcagagagcacacttagggcccaggatgtggatctgaggaagcagtgtagattggaagtcagacttgggcccagagcaaaacagccgtggactcagtctaggctctaccacttgctaccttgtggaattctgaacaacttactccattttgctatgcctgagctcatttccctgttgagaggatttagtgaaacatttgcaaagcacttagccttcaaatgctaaagagaggtttaggaaaacaaacatcccccaagctttgtatttgtagaaaacagtgaggttccattcagactaattgtggaatactgttaatcccttaccagctcgggcaataactctagtcttcagcaaggttgtagcattctcttccccaccctctcaaatatatctgggatttgtcaaagggctgtcttcactgtcctcataagccatcagcctgccaccactggccttggtcactttcagaaaacttggctccaggccccgattccaatgtaaccatcccagaaatttatcccagttactgaacattcatgctttaagaacagctcttgcaaggaagaaatctgagtttccctcttcctgccacaaaaataaacaaagaaaagtaaaagtcaaaccaaagcctgggagaagatatgcatgctgcatatatctgacaaaagacttagttctgtaatatgtaaagagttcctacaaatcaataattttaaaagccaatcacctcaaggtataaaatgggcagaagacttgaatggacacttcacacccaaaaaaagatatgagtaggccaggcatggtggctcacccctataatcccagcactttgggaggctgaggcaggcagatcacctgaggtcaggagttcaagaccagcctgaccaacatggataaaccccgtatctactaaaaaaatacaaaattagccaggcatggttgtgcatgcctgtaatcccagctactcaggaggctgaggcaggagaatcgcttgaactagggaggcagatgttgcagtgagcagagatcacaccatcccactccagccagggcaacaagagtgaaactctgtttcaaaaaaaaaaaaaaaaaaaagatacaagtagacattttgcacatgaagagacgttcaacatcattggtcatcagtgagatgcaaactaaaaccataatgagatgttatttcatatccagtatagtggctaaaattgaaaagtctgagagtcccaaaagtagacaaggatgtggaacaaccagaactcttgtatattgctggtggaatgtaatatggaacaaacactttggaaaactgctataaagttaaacaaacacttgccatttgacccacacaattccagtcaaagcttttttcaaagaagacaaagatgacatgatgacaatgaagaagaagcagaagaggaagaagaagaaggaggaggaggaggagacaacaatgatgacgatgaagaagaagcagaagaaggagcagaagaggaagaagaagggggaggaggaggagaaggaggagaaggaggaggagaaggaggagaaggaggaggagaaggaggagaagaagacaacgatgatgacaatgaagaagcagcagaagaggaagaagaagaaggaggaggaggaggagacaacaatgatgacgatgaagaagaagcagaagaaggagcagaagaggaagaaggagggggaggaggaggagaaggaggagaaggaggaggagaaggaggagaagaagacaacgatgataacaatgaagaagcagcagaagaagaagcagaagcagcagcagaagaagaacaagagaaagaagaagaagaacaaccacaacaacaaggaagaggaggaggaggaggaaatgaaatgaaaacttatttacaaaaagacttatacaaaaatattcatagccacattattcctatagccaaaaactgaaaacagtcaaatgtcccccaactgaggagtggataaacaagttgttttatgttgacaatatgagatactatttagaagcaaaaatgaaaagaacaaaaccctaatatatgagggaataagagaatctcaaaaatgtcacattgagccagacacaaaaaagtgtgcactgtatgactcctttctacggagtgctgtaccaggcaaaggccagctgtgaggacagaaatcagatcggtggctgcctctgcaaggagtatagagatggacttaggagacggaaggaattctctagagggacagaaatggtttatatctagaagggagggtgtctacgtatgtcaaaactcatcaaattgcaccctctgttgcatatacatttattttaataaagtagattataaaaggaaagagaaaagacaacaaaatatgtgtctactttaattatgctcagttggagagagcatgtcctattgcaggctgggccctaagtgttaagagctcaatgaagcatctctttaagaccaatcatattggctcttctctcccctgagtataccccaggccaccaagtaatcaggtctacttcagttctgttacactagccccaagaaaatcagttaatgcaaacagagaacagagacaggaggaccctgcaaagacctcccaaggggcaaccacgtgggttgactgtaagaggatcccctcaatcttggtggtgatttctccatttcatttgacctgggtggagctggggtagtacctgttaccccatcacttaatctagggagctgggatatctcagtgcatccctaaaatgtatgttcataatgaaggaagggttttattctctaccccaggagatgccttagagaaacaagaagcgctacaccaccactctagcgtctggagccctgtctgggaggttaggcagacatggggcaaatcctggctccacctcctcataagctgtgtgactttgagtgtgttcctgaatctctctgtgcctcagttaactcctctccgtaatgggtatagtcaaagagtgtatccgtctcaaggttgtcattagaagtaaataaactagtagaggtaaagggcttagcactttattaactctaagcattgggaacacttcataaaagttagctatgattattattacatgaacatgaggataaaagaaagtctgagattcagaggtaaatggatggaaggggaaaataagagattcagagaaagagaaggaatcaaagaaaaagactaaggtgagaatgaaataaaggcatacgagaaaaaggtagaaacagaagaagaatgaacccaaattatacttctctgcctaaagcttgccgaagcgttctgcacagctccctgagcataatctgggctcggttatttaaaaggctgtgggataatacagtgggaagacaggtctgcacggtaactcacacaatttatcacacagggaagagccactaatctttttaggaaacaaggtattcatagttatttaaggctaatatttatgcatgaccacacattgtgaacacagcccaatctccatcctcacccagccaagatctgggaaggtctttagcagcaatgttccatattttaagccccctacagaagtctcacccagtagtctgcaccggctctgttattaactgcatccatacaccagatatattcatgcacaccgctaattgaaagagcagattttcccgaggtgggtgagtactaagccgaggtgggtggatacagccttgcgtgaatttcttatgaccaaaaccacagtgttaccttgcaaaaggtaatcaattattcaaactcagaaccttcagaatatgcataaatatagtccaggcacagtccagctggtctatttcattagcctactctttacagggtgctgagaacaaaaggctggatgtaacaatacgagtgaccccagcaacaactagaaagatgcccgtttcctgcccaacccacagaggacccgatcttatctgcatttggccagaatatgaccttcagggacgttttctccagtcatggctgaggctgccttcttgtcccacagagggcccctttccttgtctctctcgttcttctcttttctactcctccctgccaagggacccagcttcatcctgcctccgtctagctgggtcatgccattgtctcctgatgtttcaccagcatatgctgggtcgtcatgcccttgccattttaatctgggttacttgtcttccttaaccctgggtgctcaagatggaatctctactggatcaataaacttcattctggtccatgttcaacccttcttactgactactctcaatgcagtattatcctcaaagacctcttctccaaccaggaggagaatgaggcagccaagaggaagaggggagcctgagtcatggctaaacaaagaggcttacaaacaaacaaaaattccagagaactatgacctgctgcatctatccaagaccaggatttttgaagcacaggaagaggtacggtgtgcactgcactgttgtcttgggaaacagttacttctttatgtctcaggatgttaggacgaggtgagcagccaatcccttctagatggaattacagaccctccacctttcttcatccttcctggttctccttcacatgcccatgaggacccacccactggttttccaaccatctgttgtttggtttttgtctggaagcacctggacattaaagtcctcccccgagtcaccctcgcggcatctgccatgtgcaaaggagcttgcaagggacctgccagtgaatttgggcaggaggcactggggaggggtctgcagtgattcagtgatattgtgaatcagtgatattgtgaatgcaaacctggctgggtatcagaatcacctgtggagttcaaaacaaaatgaaaccagaccacaaggatgcaactcaaacgttcagaattggtggcatctgtggcaggtcgagttctctgggaaagagggcaactctgaggtggggttaagggtgcaggaggtgtattaaggtccaccctggacatcagcacctgaggaggggacacaagcaggagtgaacaacaggaaaaatcaacatgcaatgcaagcctaacaatggccttggctccttgcaaaactcaggagctagaatggcccttcagagttctcccaagctgtccaggccttcatggttctggattgatctgtcattgaatgtgacccaccctggtgagccacccatcggcagctgaggcaatccctgaagggaatagtaactgcaggctgcctgcctgcctgcctgctgggaatgaggcgctatgtctccattgaaggtgaatctgggcagcacccaccacaacccatcctttgccaagatggtaactctttcccttgcctgcgggttctttgcacaaggagttcaagtgttcaggtggcaattactgtttattctggctctgtctgttggcaaaggtgcttcctctttgggacccaggacctataaacctgaagaacacagagttgtgggtacaggaagcacaaactccccaagtgagttaatgggtgtgacagcaaggaagacaatcctgcttccatcccttggttcctaggtgtgtggatattttccaacttttgggtaaatataattttatatgtatatatatatatgttagtaaagcatcaaataaatatcttaaagtgttttttgcatcctggagaatgattgctgccccatccttacaaatgatcacatctaagctggtaccttagttgtgcttcgtacagaccttttcaacactttattaggcaattttttttctttctaatttttattttaggttcaaggggtacatgtgcaggtttgttacatgggtaaattgcttgtcaaaggagtttggtgtacagataattttgtcacccaagtaatcagcataatgtctctattggtctattttcatactgctataaagaatgtctgagactgggtaatttataaagaaaagagatttaattaactcacagttccaaatggctgggaaggcctcaggaaacataatcatggtggaaggtgaaggggaagcaagcacgtcttacatggcagcaggagggggcggactgccaaacacttttaaaccattagctctcatgagaactccctcattatcatgaggacagcatggggaaaatgactgccataatccaatcacccccaaccaggtccctccctacacacatgagcattacaattagagatgagatttgggtgggaacacaaagacaaaccatatcaatatccaatagttttcagtccttgccctcctccaaccctccaccctccagtaggccccagtgtctgttgttcccatgcttatgtccattggtgctcaatgtttagctcccacttatgaggacatgcattgggtgtttggtttcctgttcttctgttaatttgcttaggataatggcctccagctccaaccatgtttctgcaaaggacatgattttgttctttttatggctatgtagtatttcatggagtatatgtaccacattttctttatccaatccaccactgatgggcacctaggttgattccatgtcgttgctattgtgaatagtgctgcaataaacatgtgtgtgcatgttagactagcaactttggatggtacgtatatgacatgacaaggtaatcttgacattgattccatgtcattgctattgcgaatagtgctgcaatgaacatgtgtgtgcatgttagactagcaactttggatggtacgtatatgacatgacaagttaatcttatggccatggacccaatcccataacttcctttgctttaaagtgggtctcctggaccaatgtgacactatatgggatcctatcccagtgtatcaagccctctgtaatcgcgcgaatggtggctgtcactgaagcttaatgggaaataaagtcccatacatgaaataagaaccccgctcccacaggaatgagtcactggtccttccagggtggaggaccccagtgtaatcaacttgccaacatgtatccaggtggtcctcttgagggatggtgccatatcagaaattcaacatgggtccttgttactggcattttggacaggcaatagcagcaacagctagattggccttggtaagccagagcctgtgctgttgggcccatgcaagtagccatccctgccaccatagctactttgctcatgtactttgctatcatgccatcattggggttgctgatgatacagggtggctagcatcagctgactaagtcagtttgtctacgtgatcatttagtgccactattacgctgaaagctctctgttggacattaatacacaatacacagatcttcatactttgtgcctgctccaaaatgcccagcctcatgactctgccttgaagctcccaggtgcaatctactctggctacttctaggccctgaccagacaacggagccattcaccattcagcctatggcatcatatggatattctaaccttgagcaacttctcttcccatacacagtggatgaccaggatggtctgagctttgccccttggaagaatgttccctcatcactgtctttcaaggcaatccttgagaggaaccatggtgcagccaccatctgttttcagcctgcaccctcatgcaagtctaacctttctgtgaaccaagctcaggccattttgtcttccatcagttggtcacaagggatcccctctacagcaggaggagctatctgaggaaaaggtgctgacataacagtggagggtgacatgtggatctggactacctgctcatgcaaattccctgtgccatccagtcctcctcatactggatcccaggtggaccctttctaccttctgatagtttgtttccaggcttgactagcattaggagttgctgagtctgacagatgagctcctgatgggcagctatggccacatgttcaccttgtgtcccatgatcgggtgtgtcatctctaccaaggcccataagacaatcagaagttgtttttcaaatggtgtataattttccctaagcagatgccatggccttgacccagaatcctagtgattctctcactggagcttgccataaactccacatggtgtgttttcaaagtgctgggatatacctctactaccaatgggtctgctgagttttatagcccaaatggcagggctgctcacacctgtagacagaacctgttatagagttctttcttgttctaggtcccattcaaatctggcagcctttcaagtcacctgggtcagcgcagtataggtatacattttgttgcttccagaatccagagaaacagagaacctaccagccattgtgcttccttgttttttgttgttgttattgttatgtgtttgttttgtgagacaaagtctcactctgtcgcctgggatggagtgcaatggcatgatcttggctcttggctcactgcaacctccacctccctagttcaagtgattgtcccgcctcagcctccggaatagctgggattagaggcatgtgccaccacgcccagctaattgtgattcctttttcacagcaggagatgcaatgtgcaatcatttcttctttagtttggaggcaatgttgtaatatttccttgaccactgaactcttaaaaatgtttactgatgcagcagactcctgaattttcataggctttgtctccctaactctggctcacatatgacttaccaaggcctccaacacgctacatatcttgcttatctggtcctattagcgtattcgctatggaacggatcattgtgattttctgttggatgtcaacatgggacagattactttggaccacattatgacagagggcaggaaagttaacagagccttggggaaatctatgaatgtatcctgttgtttgttccatgtaaatgtaaactatttctgatcatttctgataggtatggaagagaacacatttgctaaatcaatgctgcatatcatgaattgaggccatgttaatcaactccagcaaagacatcacagttgcatggcagctgcgatcagggttatgacgtggttgagtttgtggtgctcactgttatttttcaggatacatctggttttagcaggggctacactggtaaattaaatggatctctgacagaaaccaccacccctgcaacatctgttaggtttgtaagagtggggctaatgcttcccatctccttccccctgaaataatactgtttttattgtcttggcaggagcagggtgaggggcattttcagagtcttctcttggctcccctcactatgacagtttttactctacagtctaagggctcagcaaggaacttgcaccaactaccaagtgcctttattctgattttacatttggaggttaggaaaataaccaatttactgggcttaatgcattatcatggccttactatatgactgggggtacaatgggactaagtaataaatggagccctgttcaaaaccacccacccagtttctaggtcccattcaaatctgacaacctttcaaatcacctgataaatgcgtaatgctttaagccaagtaaattggttattttcccaaaccctgaatgtataatcaaaatagatgcactttggactaatatagaccaaagtaatcggtcctatgttgacatccagcaaaaaatcacaatgatctattccatagcaaatacgataataggacccgataagcaagacatatgtagcatgttggagaccttggtgagatatatgtggtctagagtttgggagataaaccctatgaagattcaggggtctactacatcagtaaaccttttaggagttcagccgtcaagggcatgtcaaaacattgcatttaaattaaaggagaaataatcgcattttgtatctcccaccatgaaaaaggaagcacaatgtctggtaggctttttggattctagaagaaaaaaaaaaaattgtatacctgggaattttgctatgacccaggtgacttgaaaggctgccagacttgaatgggacttagaacctgggtgggtggttttgaccaggactccatttattacctagttccattgtacctccagttgtatagtaaggccatgataatgctttaagtcttcaagtattaatgtcccctgacactgcttgaaatgtttgcctacttccctttttctggaatgtagttacccaagtatatggctaaagttctctttgaggaagaactggatgctcgtaacaatcaacacttgccatagtgctccagggtcctccagggtccttcctcttgagtatatatatggtgtggtatatatataaatggtgtgtgtgtatgtgtgtgtgtgtgtgtgtgtgtgtgtatatatatatggtgtgtgtatatatatatatatggtgtgtgtatatatatatatatggtgtgtatatatatatggtgtgtgtatatatatatggtgtgtgtgtgtgtgtatatatatatatatatatatatatatatatatatatatatatatatgaactagtatatttttgcatggggaacccttccactgaagggttaaaataaaaaatatttttatattgggttatggtccagtataaaaaatatactggaccatatattttttatgctggaccataacccttggactgaagggttccagttccaaaaaatagctcagatccaaaaaccgggcacagtatttggtcattttattgtggcaattcctcagcctccttaatcaatcattcttgatttctttagaaatcaagaaaaactgagtagtagtaattgagtaatacctgtgttggctgcctttaaggacaatcttgctctatcaaccatctccatatctctctgtaggacaggccaacctggctgccctgccaccatggctactcattaagataattgcatcttcttggcttctggtgtttaagcatcaccatctggactctattgttttgaggaatcctaacatccccattactctcagtgagccttattctgcagcgcctctcctaaagtctgccctggcctgctgaggcatgccaccaccaaactcctcagtgacactggtgcctttgccaccagggcattcctggtggctttgggaaattgggagccttctgggtcattccatgggacatcattctctggagggtttatctgtcttacatggtacatgctctcagcatgtccccctctctaaattgttaaatattttctattctcacttttgcaaaaatactcacattttaaccttagtgtgaactattctttttttttttctcctggggtctttctcaggcagacacatattttccatgcctgggagagtgctccagtattgaaaaaaaggtctcccttacccaaccttctcatttaatctggttctcttgacaacccctttccgaatgcaagccctgccattctcctctagcttatgtgggtacacactgcctagggtgggggtacattgtcccattctccctctatcaggccagcatattccccagctgagttacttatgcaagagctcaccaaaatgagtagcaaagcccagggaagaatccagttcacctgcattcctcgatcttcctggtatatcattgtgccctgcaaaaaaatatgccctaaccctatgcatttggcatgcctctgttggtctggaagacaacagtggtaatcatattcaccaaaaaatatagttaattcttcaacgttccatcttctacgtaaatataaaagtgctcctgggtatctctaaggacatagctgaactcatccaaaaggctttcaaaccttatttcagaatactgtttttaaagcattattctcctcccacctacatttcaaatcaaaccatgcttactttgacaaggatgctgtttttccttcaaagagccactccccaaaatgtacttagaaagaaggaaagaacatcactgttgagttgtaacaccagcttccctggagaggatcccagaaaaatgcacggattttcagcctttatgtaaaagcccaggacttcccaatcctcagtatgtgaaatatctcaaacaattagtttgtgaaagtgctgtcatgtgtaagcgaacaaaagccctagacataagaatgtgctcatccttctttcacccctggagcctttgttgagcatgtagtatgcacagaccccacatcagggactgtgggaaaacaggagtgatgcagccctgtgatccagcaggaaaagagggggttgttgggtcacattcctgaatctgaatccctgccaagactctctgaattgcatctgacaatgtccaagccttggttaattcttctgtaaaatggagatgcttgcctcaaggggtccttgtaaggagccaattagatcataaatacaaaggtactttctaagtagtgaagcactttctgtaggttaacactggctactgaaagaaaacccaggttgtgcttccaaataaatgcctatctagaagagaaagtaagacattgaacaattaaggaaaatgtactataaaaagtgagccaggataatggcttccagctccatccatgtccctgcaaagaacatgatctcgtttcctttttatggctgcatagtattccatggtgtatatgtaccacattttctttatccagtctatcactgatggacatttgggttgattccatgtctttgctattgtgaatagtgctgtgatgaacttacatgtgcatgtatctttaaaattgaatgatttatattcctttgagtatatactcagtaatgggattgctggaaacagaaaaccaaacactgcatgttctcatctataagcgggagctgaacaatgagaacacatagacacagggagggaaacaacacacactggggcctgtcagggaaggggtggggcaggaggagggagagcatcaggataaatagctaatgcatgctgggcttaatacgtaggtgataagttgataggtgtagcaaaccaccatggtacacatttacctatgtaacaaacctgcacttcctgcacatgtatcccggaacttaaaattaaatcaaattaaaaaatgttttaaagtgaaacaggacccaaagagaacaaacagaagagctctaactttgcccagaacaaagggggaagatgttatgttaaaggggccctgcagcatgatcagtatttacatactgatcatgttacatacataacaggctgtgggatgtggggataggactcaaaagctgggtttggcaggtttaaggatgctatgaagtttggatgttaatttgtctttcccaaacttctgtcatttagacactatcccattatctttgccaaacccatgcatttcctatcatgttatcaacttaatagctccctttcaatttttacatgaacacacttgtgctcattgccatatcacagcagtaatatctgtcaatgtacatgtttaatgtgctaggtgaacacttttctaatacacatgaaaattaatttaaaaaaaatttttttgagatgagacctcgctctgtcactcaggctggagtgcagtgttacctcgactcactgcaacctccacctgccaggttcaagcaattctcctgtctcagcctcctgagtagctgggattacaggcatccgccaccacgcccagctaatttttgtatttttagtacagacagggtttcaccatattggccaggctggtctcgaactcctgacctcaagtgatccacccgcctcagcctcccaaagtgctgggattacaggcgtgagccatcgcgcctggccaaaaattaacttataactataaagtgttcctttgtatcccactgaaaatcctattgtgttcatccatggtaaatgggccccacagggcaaggggagccactgggaagggtttggagggaaagaatgatgtaattagcatgttctcttttctggtagcccatgtaaaaaataccagttaggaagttatttcgattgcacccaggtgtcttttcctgacctggggacagaggagtggggatgagaaggagaagtgaactctatagggacactcagggctggttccctagaagggaagtgtggggccaaggagataggaaggagtccagaattttgaaacccagatgcagaaagcccttgaagctcaggaacttccctcagttttcactgattaactgaaaagcggaagttaacataaattaaacctggagtaaacataaactctgggtcacttctttggaaaatgaaagtaaatgcataaagttatttacatctttatgtttaaaaactatctaagggaaattggcttctgaaacaccatgtgttttcactcatcaaagacctatttagggacatgaccacatccggaaagcatttgtaaagcattaagatattaccgaaaaatgggttaagaacaggacaaacaagttacaaaaggagagctacaacttgccaagaaaatatgaagaaatactaaggctcaccaaaaaaaaactcttgtcaaataaagcaacgtgttactattttcaacgatcaaatgagcaacttttatgactgtgttagttattagggccttcaccagctatttccagctctcccttaaggactcacaaaggactccgcctcctggctctgtctgggtggatggggccacgtgattcgttttagacaatgaagtctgagcggaagtgacatttgtcacttctgggctagatggcttagttgccagttggagatgccccagagctttctttcctcctgcaacagtgaccaagcaacattccagatggtggctgctcaagcaggggtcccaaggtgatggacgcctggagcaaagcccagctgatgcaggatggacatggagtttgagtggagggtgaacttgggatgtcacaagccactaaaaatgggggtcgttaataaccctaccaacggattcaatggcaggggtcaatgctggcaaggggaaaatacaacaggaatggaatgcacattcctctaactcatgttaaaaatggttaccccctttgacccaaaaattccacttatggggatcaatccaaaaatgtaaaaatgcaaacaaaatatggaaaaagctttatggtgaagggatagactaatgaccaaaagcatggcctttaaggctgggcacggtggctcatgcctgtaatcccaggactttgggaggccgaggtgggcagatcacctgaggtcgggagttcaagaccagcctggccaatgtggcaaaaccctgtctctaccaaaaatacaaaaattagccaggcatgatggcaggtgcctgtgatcccagctactcgggaggctgaggtaggagaatcgcttgaacccgtgaggcggaggttgcagtgagctgagatcgcgccattgcactccagcctgggcgaccgagcaaggctccatctcaaaaacaaacaaacacgcaaacaaacaaaaaagcatggcctttgtcaaactgctatccatttgaattctggaattgccccttaccacctatgtaggtgattcgtagccttgggtgatttgtttaactgtctaaaccttagtttctttatctgtaagatgggggagatatttctttacctcatagtgttactgtaagaataaattagatgctgtatgtacaaaccttaatgaggctagctgtgtgactagtatcacacacacacacacacacacacacacacacacactaacacatctcaatgttactttcttagtccaacaagagaaaacttggatgcaacccagtaagccacaaaaaggactaataagggatagtaaacccacgagatggaaaatgtttatgtgataatactaattttaaaatcataagacaaaattgattacacaatataatcacaattatggaaaaataatgaatagaaacataatgagcagaaatatatcaagatcataatgagttgtgtttgaaacataaaattattgttttttttctacttctctgttttccaaatttcttaaagtgaggcacatgtgtggaccctgaaaggagacttctctagttttgaagcctaggcctcccacctctcagctgtgtgaccctgggcaacttacataagttctctggacagggttccccacttgcgaaatggaaatcacaatgttgtttcagtaatgaattagataatccctgtaaagttataagtataacgcctggaacagagtaagcagtcaataattattatctatttttgttgccattatcattgtatgttccttttgtaatgtgggaaagaacggtatttcacaatctatgataaagcttttaataacagaaggttgtctgtagcaaatacaatgctcttcacttgggaagttcacagtccaggaaagataacaaggcaaaagacaagcagttcagggctacagagaaaagcagaaagcactcacccccaggtcgggacaaaagagatggcctaaatgctgtcccaagaaaggcacttggcttggagcctccacatccccaaggtcagggccatcttgtcgggacgcatgcagaactctctcactgacagctgcccctgcagcagctggctcacccccatgatagatgagaattacagccattttcaagagaccaacagaaggtgggccgtgtcctgataagctataacaacagtagtaaagttctaaggagaccagagggtccccacaaccacacacttcctgcagctgtggctgctgtaattatggccgtgacagctgggcagccgggggacatgactggagtagactaaggcatgggcatatggcactgctggtgggcaaggccagcccacccctccctcaaccagtgcccaagttcagctgcatcctcgagcctgactgtcaggatgccatgaaataggtccccagcgcacccagtgggcaggtgcaagagaaggaagagctggagtgcatctttctggtgcccaggctttactggtgcccagggccagacacacagtgggcgctccacccttgccagcactgtctggaatggcagaaacacattccagagctcaatgctgctggcaatgtgtttgaactccccagccttccacgggaggcccatgctaacagaacaccctctagtcactcctccgaggacttgttggctggttcctcctctctgaaaaccacccggaatcatctgtcctcagacagaattaatcagtcacctctcctctcctatggctgagtcttcagtgcacatctatctaagaccatcccttgaatccataaccacatatctgtctcccctctaagcttcttccaaagagaggctgtgtccttctcattttatgttcaatcattaaagaacgattcatgattaatgaatcatttgttcaataaatagagcatgaaccatacaagatagacacgccatcctgggaccaagagtccaactaaataagaaattacaaagtaaaactttgggattataatagaccatgttaaggtgcattacatgtggcaatgagacctaatcaagtcttaagaaaccaaggaagtcttcctgcaggaagcctgaataggtgttaaagaagttcatgaaaattaattgtggagagggggtgatgatggaggaagacccagagagctgcaggagagacaagcctgggtgaactgtgggggcctttgcaggactgttaaaggccataggaagtcacattgatggctttaagccaggaaatggcatgatcgggtctgcaatttataaagagcagtctggttttctttggaggggaaaaaatggggcaaagtagcaataacaggctaggtgtgtcgcatcttagcacaaggcctggaacataatcactaccttctgtttgttggcctgaactaaaggaggtggaaacagaatggacaggtgcccaggtggcacatttcagggttttactcaccctattatccaacatgcatcaggtcaaccccacaggcccctgtcttgggagcctcaaccccaccctgaacagcctttgaagataatccatttccttcaaatatctccgtgtgcaccttccttgccctctaagatagcaacacctacctgcagacgtgaatgtgctgagctccacaccctccatccagaaggggatcaccgggatggcagggaaggagtgctgccaggaagttttccaactccagtttctaggtctgtatttaattccggatctatcagctaagcatttagggtgctgccactgaagctctgtgtttacacagctaaatgcctctgctcctattgacacaatgtcgatgaagagggatgcgtcaggctccgccaccaccaagcacgtcatgtgtcccagattgatgaagcttcctgacccactccagccccagcagctgcatggctcctgccactcagcccagcaagctgttctccatcatctccattaattaaggactgtcatagcagggaggtgagacagcaaatcctaaatacttgcctcaagtctcagcttccaaattcccaggagtcttaccctgaaaacagaaaagtcagatttaacagtggggtttttatctttccgtttacaaaattactaccagctcattatagcaaatgctaagaaatgcacaaacacaaacatacccagaagaaaataataatcactcatgatccccccattcagaggtaaatgctgatagcttttaaattcttacatatatttcttccatgcatatatacacatgtttaatcctgatattcagggactaagttcatgtcagtaaattgtttcctacaacattattgttaatcgctacgtagttttctgccttgtgactgtcctgtacttcaaccaatcttctattgcactcaatgtcgtgctattataatcaatacagtaatgaacatcctggaaataaatccttagagaagagttcattagacttcattagaataaatatatgatggaaaaataacctaccaaaagaaatttgcttttttaatactttggctgtgcattgtaaaatcaatcacactttagaaatgtatcaatttattcctccaccaacagaataacccctacaacacaactgcatatgcaactaacatagcaacagcaactgtatagtaatcctgatcactatcctgttacaaagagttaatgcttacctagaactctctatgctcctggtactgagcaaaatacattaaatatattgttccttttcatgttagctttttactttctagtgagggtgaacttttttcccttacattcattggccactgtgattctttgttataaaatttcctgcaattttcttggcctattttttagtgtgtttgtcatttaattattggtttgaaagcagtctgatttaataaggatgctatacacttgtgttgcaaaaatgctttcccccaggttgtggtttaacatttagttttgtttatgatcatgttgacataaagaattttgtcattttggagtagtcaaatgtgttggtctcttattttacagattacgcctttacatacactctgagtacttgcataccacaacatcagataaatattcatgtgttttccttaaaatctttctatggcttcaaattttatattaaatattttatcaatctgaaatttgttagtgtacgtggtgctgtaaagatctattttttttccacacggtcagcaaattgacctaatttgacttactgaattcctcatcttttccccactgatttgaaatgccacatttatcttatatgaaattcatatttacatgggcctgcttcagctctcctcgtactgttccattgatttatctgtctattcctgcaattaaaccagactatttaaatatatacgaagctacaaggacgtcactgcacattgcttacccagtagtgcaagttcctcctcacccttctactttttcaaaacattctcagcaattctaaagtgccagatgaatgtcagaatcattttataaagcaccacccctccaaagtcccactgatattttcatttggatcccattaaacgtctagatcatgtagagcgaatcggtaactttatgttattttaattttaattcaataacatggcatattttaaattcatattccttattttaatttcatcacatttctacatatttcttgtaaacttttccctagatattttattgttttgttgctaatgtaaatggcactttaaaaatcatcataccattggtgtaaagaaaaactaactttttacttatgtgattatgttgacaaaactttatctttaaacttgcttgatagtgtagtaatttttcagtttgttcccttgagttctccaggtagacaattctccttcatccaagtgtcagtaaccgtataatcaactactttcaaacagtaaatcctctattttgtagtcttggtttattcaattggtcagaatttttaaactgtgttaaatatggcatggatagtaagaattctgtcatatgtaaatagaaacgcctctagttttccattctaaaatataattaagctgttgacttgggggtgagagcctctttcttgataaagaaggttcaatttctatcatactaatattgttttagattttgtttcttgggaatgagtgttgaattttattataagccatttcagtaggagatgtgtttaaatcttctctcttgacatactaatatatttaaatatattattatacttataattagcattattatattataattagtattataattagtattataattagtattattatattatgattacaattagttttatattataattagtatattatcaaatataccaatatatttaaacatattggtacatttcctaatattaaattattcttgaattacttaatggaaaaaaactgaaccagaagatattgttcttttattccactgtcagatagttttcacgtattatttagcattttcacaatttcacatagtattcacattttcacatagtattttcacagtttccttttttgaactatcttcgtccagctttaatattagagtcaccacttcataaaatgaattaactagtgtttttgatgcaggtcaggtgagccccaaagtgagacttagcctgcgagggttcttggctttgcccagaaaagaattcaagggcaagccggtgctagggtagaagaaagcaactttactgaagcagcggtgttagagctccgtgactgcccctgcagagcagggcttccccacaggcagtatgctgagagcagcagctcaggacagttccgcagtcagatttctatctactcttaattacagatagagtaaggggcagttaatgaggaaatttctaggaaaagggtagtagcttttgggtaattggatcattgccacggaaagaggtagtaattcctggtgttgccatggcaatggtaaactgacatggtgcactagtgggagtgtcttatggaaagatgcttccacatttcctctgttttagctagtcctcaatttggtccagtgtccaagccccacctatggagctgagtctcacctcctaccttatttttaggggtatctatgctccgaaactatttgtataaaaaaatacatttcccataaaagcatctgtggtttcttttgttgttgtggaaagtaaacttttgataactttgaacagttctctcttagttacttatttgttcgagagtttcatagtcttgagtttccttaaaattttctaatatttattgtaaaaataatattaaaatgggatttgattatttactctcatttttcttataattttatgtttgaggggaattttatcctcatttcctggataaatatattagaaatttacttatattttaaagacacagaacttagatttatttgttgatcctatttatttttgttttgaaaataatttatttcattgtggttaatttaattttttttttttttagaaagagtctcactctgtcatccaggctgaagtgcagtggcacgatctccactcactgcaaactcctcctcccaggttcaagcaattctgcttcagcctcccaagctgggtataaaggcatgcaccaccatgtcaggctaatttttgtatttttagtagagatggggttttgccatgttggccagtctggtctcgaactcctgacctcaggtgatctgcccacctcggcctcccaaagtgctgggattacagatgtgagcaaccgcgcccagccagttaatttaaggacaaaggattcataacgtagcagtgttgacttgtggtctgtccttatcttcctcaatatatacatatatacaaaagcttttacatacataacatatagtattatatatatatatatgtttatgtacatatatatcatacatgtgaaaggtcttaaatttgaaatgcgttaaatattgtgtattaaatgtttaatacatattaaggcttacacattaaagcttttaactttttaattcctttccctttcttttgtactctttatttgcaatttccttcctggtatttatttacataattgcgtttatcacctaattcctttacatttacacttttagattgaataatggaagtagactatgaattttcctatgttcagctttgacagcatcctatgagttttgcttcttcgtgcctctttgtcagtattttccattgtttactatgattgtgatccacagtcacaaaaaaagttagaaagagaagttttaaaccatcaaaattatatcaccaacattttctattttaattatttgtttttctagataaacttatgaatgtatgttgttcataaattcagtgtagaaatacatagacaaaattagtagatcataaaataatgatcacataaataatgatttctatggcaaatgacaccatgaaccaagttttaaaaacaacaaattatgaaattttacaacctatgacaaagatatttcatttcaatcaataagaaaaaataactaaatctgcaaaaatatacacagaatataaacagaccactggtcaatatcactaaacctgtgcttttaaacacaaaataaaggaaacggaggactaacgatgattcaatgcaacttgttcatgcccttcctccatttttgaaattgcgttgtcaattttttgggggttttttttggaggcaaggtcttgctgtattgcccaggctggagtgcagtggcaccatcagggctcactgcagcctcaacctcccagactcaagcaatcctcctgcctcagcctcctgagtacaggagactacaggcacacaccaccacaccaggctaattgttttaaattttagtggagataaggtcttactatgttaaccagcttgccttgaactcctgagctcaagcggtcctcccacctcccaaagtgctgggatctcaggcatgagccactgcacccagtcatgttgtctttttacttattgattaaaaaaaactttatttgtgatattaatgctttattgtttattttgaaaagtctttttcatgatttgtcatttacattttaatattaagaacaatttgctatgtatttcttaaaaaattagtcaaatctgcgggtctcacctgtagcaaacacatactgagtgtttaatattaatacttatgtactaagcccacaagatttagctcagcataggtttcactcaattactgtagccaaagacactcaaactccagcagcttctcgaaaattctgtttgttcattaacgcacattgactctaatgtggagtcaagcaaataagtctttttaataagaatcatcacaattcatcagtcattatttacttagagtttcaaaatcaattttgcaatttctatcacatatattaagcacatgccatcaattttttaaaaattttttcttttcgtgtcatcaatttttatcttaaaacaatacatagtagtgtcataagaattacatgttcttctgaggacaggcctcttaaaaaaaaaactgcctatccctcttaaatgttatatttaaatccgaagaatgcaaggatatgattgttggatttattaagtgcagtacttgaaaaatatgaaatttccaatcacacttaaaatgaagtatgtgaataaataaaatgtgttaatttgtattaacatttttaggtctgcggaaatggcattgaatatgttacacctgctatagctaggacaccaagtttcttatacactcagctcatttacatctttccaaaacaatagctaacattgagcttaatggcaaaaaaatcaaaacatttgtaataaaatgagtaagaaaacataggtgtcatctttcactaccattatttaacatttcacaaaatgttaaaagcttctcctaattttttctgtaaaatagatatagatgtatctttccctaacttgattaacaaatattcctctctcaaattgacagcaccaggtgaggcactaaagaaattctttaaaatcggtaatataataagtatgtgctcaatctttgcattcaatttcatggatctcattgtgtatttaaggagaaagtaccacattagtttgattctagttgcttaataatatactttgttaaatatctcaatataatacatttacttccctccactcccatcctcattactctttattcagagcattagttctactcttccacttttacttttccagataaactttaagattattttatcaatttcaaaaagtcagtaaggagagaagagattgagaatggaagggattgcatcagggtgttttggtttgttttgttttgtttttgaggtggagtctcactctgtcgcccatgctggggtgcagtggcacaatctcggctcactgcaacctccacctcccaggttcaagcaattctcctgcctcagcccccagagctggaactacaggcatgcgccaccacgcccagctaatttttttatttttagtagagatggggtttcgccatgttgaccaggctggtcttgaactcctgacctcaggtgatccacccaccttggcctcccaaagttgcatcagggttttgactggcgttgcattcacgttggaagtaacttaggggagttgcagtcccttgcctccttgcctagcacaacatcctcattgttctccaggctcttcccctagttggtctttccttgtagtctctatcaatacatgatgttatttacaggaaagaggtcccgatccagaccccctggagaaggttcttggatctcacacaagaaagaattagggtgagtccatatagtaaagtgaaagcaagtttatcaagaaagtaaaggaataaagaatggctactccatacacagagtagccctgagggctgcttgttgcccatttttatggttatttcttgatgatatgctaaataaggagtgggttattcatgcttcccctttttagaccatatagggtaacctcctgacgttgccatggcatttgtaaactgtcatagtgctggtgggagtgtagcagtgaggaccaggtcactcttgtggccatcttggttttggtgggttttagccggtttccttactgcaacctgttttattagcgaagtctttatgacctgtatcttgtgccgacctcgtatctcatcctgtgacttagaatgccttaaccatctgggaatgtagtccagtaggtttcagcctcattttacccagctcctattcgagatggagttgctctggtccacatgcctctgacaattacattatacacttgttggtttttttctatgccacttgccatgtccgcagctgaaacacaaactccaggagagcaggactctctccaactcactcctgtatctccagtgccacagacgaagtctgtacccaccaatattttgcaatcaagggctgaggctcatagtttttcagttttcttaggcttttcagctacgtaatcatatcatcgacaaatagtgatgtatgcctcttgcttttcaatatatattcttacgtcactttcctatctaatgacattgcctcacaattccagaattctgttaaataaaagcaatgattaagcacatacttgtaatattgatttgaaaggatttctttttatgtcttttatatttttaaatttattttattttatttttatgagacagagtctcactctgtcacccaggctggagtgcagtggcacaatctcagctcactgcaacctctgccttctgggtcccagagattctcctgcctcagcctcccgcgtggctggggttacaggcatgcaccatcacaaccagctaatttttgtactttttagtagagacggggtttcaccatgttggccaggctggtctcaaactcttgacctcaggtgatcagccagccttggccacccaaagtgctgggagtacaggtgtgagccaccacacctggcctaaaggatttctttagtgtctcacctggtgctgtctgtcatttgagatacaaatctttgttaatcaagttagagaaagatacttctatatctattttactgtgaaaattcaggaaaagcttttaaaattttgttaaatgttaaataattatagtaatagaagacacctgtgtcttcttattcactttactgtaaatgttttgattttttgccattaagcctaatggtaggtattgtttttgaaagatttatttatgttctttgtgttatgagaattctcttgagagaattatcttgatttttcatagatgtgctttgaaagtttaaaagaaggagaatgcctacgcctacagctatatgagagtggctctttcgcaaacgtttaccatggtatttgtctatttagcttttctccttctttaatcaagattaatctgtatctttgcttataaaattatccattacatccacgtgttcaaagtttttacatcagaattttacaaatagtctattctgtctttcaattctctgtggttcttttactttcttttactattaaaaagcatactttttaatagtatgcttttatatttttaggttttatagtttatttattttaccatagtttaatctggctcttatttttattttatttatttatttggttcccagttcatcacatttcagcttttatcactacttgggtctaatgtgttgctttttagtcccccttttgagttgaattcttaattaagtaattcttaattctgaattacttaatttcatgtcttttttgttttgtttgactcttaaagggtaaagaatacgaatttttcctctcgatactgtactgagtacaagatactctataattgcagttttgttttaatcttcagcctaaaggtttagttttgttctgatttttgaacactagtgttattgttttaatggataaatggttagaataacaaaagggcattttctattgttatcagatactattcctaaattggtcaatgaatataacttgtagtgtatttagtttttgaatctactaacagtttgatggcctaatttgtattctgtgagaaggatgtggactcccctgtagaggtccatgcattggtgtggggccagtggctagacttctttggtcagcttggtgagtcaagggctaagagatgcactaggcaccatggttatagctgtagagtttgtcatttctcctttgtcctttatcaaagttagtattttgtaattttgttcataaccacccaagacagttgctcctttgttttgaattgttatttacaccactctgagatgctcttagacctgtttactttttacatgttaatgtaacaactgttatatagtgctagctatgccaggtgatatagtttggatgtgtccccacccaaatctcatctggaattgtagttcccataatccccacgtttcatgggagggacctggtgggaggtaattgaatcatgggggcagttaccctcatgctgttcttatgatagtgtgtgagttatcatgagatctgatggttttataaggggcttttcccccttttgctaggcacttctccttgctgctgccatgtgaagaacgacatgtttgcttcctcttcctccattattgtaagtttcctgaggcctttccaaccatactgatctctttcttttataaattacctggtcttgggtatgtgtttagtagcagcatgagaatggtctaatacaccaggcatcttataaatattaagtcatttaatccctgcaacaaccaatgagctaggtattattattctcattatacaggttaggaactaagatacagagacattcagttacaagctctaggcaccataaagagagggtcagaagtgttcttcatcccaagttccagattttctgttctttttaaaattatttgtattgagatagaattcacttataaaatgtgccactttaaatataatataattcagtgagttacagtatattcactgtgttgtgtagccatcactactaactaattccagaacatttccattacccataaaagaaatcttgtaccatcagcaaaatactgacctcacccccacatccctcaccccctatcaatcactcatttgctttctctctatatagatttgtctattctggacatttcatataaatggaatcacatgactgtggccttttgtgcctggcttctttcatctaccgtaatgctttcaggctcatccacattttagcaagtttcactactttactcctcgctatagctgagtaatattccattgtatggatataccacattttatttatccactcatcagctcacggatatttggattgtttccactttggggctaatatgaataatacctttatgaacattcatatacccatttttgggtgaacatatgttttcagttctcttggatatgcactttggagtaaaattgctgggtcatatggtaagactatgtttaactttttgaggaactgccaaactgttttccagagtggctgcactattttatatttccaccagcaatgtatgtggcagaatctgtgctgtcaagggctgtaatgtattactaatcagcatttaacttgaatttaactcgttcagatattattgtgtttacccccactttatttctgcttgtatttgtatgacatctccaaacttttaccttcagactgggtcattcatagttaaatatctctctttaatacaacacctgcaaaacttgtgggttttggacaagtataagattatttaactattaaatcaagatttgttgctacagcagatatatttactcttactttgctgtatttattttatgctttctctttttaatgttttcttcctctttatttttttctcttttgctctatatgaggtctgttttatttttttcccatctggtaatttggacgtagtacagttagattatatttctggtggtggctatgttttaactttatgtaaaatctttaaacatgtattatcaattatcagtttcagatatgaagcaagatgttttagtattttctacaaaagatgaagattctgcatactatcattatatctggcgccatcctcatcgcacactgttctctaaattgctatgctctgatatttctgaccctactaattttagctatattataattatttctatattgtgcagcttttctccctagaataagaatattttgatgctgtcttgtaatgttaattatcggtgctatttggctcggttctatgatcagtcctttcataaaacagcctcttcttttgtggatcttttggtttgctaaaataaaaaagcaaatgggtgatacatcctctgagtcctcgcatgttggagacttgttcctacagcttttactaaagacaaacaagtggactgaatatagtattctcagatcacatgtttttccatcacaaattttcttgacctattttctcagactttctgggatctgatgttgctgaggaaattctgaccaaaccaggattttaaattttctttgtgatttgtttttcagacctgggtgtttgttggcttcatccttgaattttaataattttcaccaggcattattgcatatattattcagaacacagtaagcccagtcatttttgtcaatttagtttttcctgcatttcaggatgatttttgttgtataactgcatgctattttggtttccacttgttgtatgctctaggtcggtcagcccacgtgttgctatggcgagcatgccccagtagccttccatatatgccttcctttctctcgtggttgttatttatttttcattttcctttgcatcttccaagattgtctaaagcctgttcatactcccagcccctgactcaggtttctgcagtattaattatcttctttgctacttctattttgtacattctgcactggtgttatttttccctcagtttctttcctcaaacctggcaaatgtcttttcttctcagtctgttctttgatcaagcttcctgtacacttgcagctgaccagcagaataatactggataaacatctcaaaatggaactaacatatataccctctgcttttttattcccttccccatgtcttacaattatggcatgttatgttggtttttccattggttaccttttaaagcttaagtaatgtactactacttttattcctgtttcatctgtgtttgatggtggcttctaatcccccactgtgtgaagtcaggacatctgtgtccttactcctccttgtacaccttcccccgacacattttgatcctccagtcaagtcttccacacatccttcttagggtgactctaaaacatgaaaaccatgaatcagtattatcacaatgaaactattcagtgcaggccaaaaaatgtaccagaattctaccttcttctcggaaactcaatgccatagaccctggagattcagagaagaatattcctagctcaaaaatgaagtggaatctaattttttgcatcaagtgtttaaaataacagagcaattttgttggcttcctattcaatatatgacattcttgcagtctttttgtttttgttgttttatttctgttttgtttttctcctggagtttataattgcattttttgggggggtgctttttgcttttgtcatatttatttttttaaaaacttttcagatactttttattctatcatattctgacattctccttccaaatccctctcctctatcccctacaataaaccacttgcctacttcaactgctgcatggctgtcatccagggacctcagaccagtgtctccctgtttcctagatagatatatatctttctcttcttgatttagttcctcatagtcctagagacatatccatacccctttttaaggaggggcttgcttaaacattacaacatcacgagaaagctacaagccaattttcctcaaaaacgtgataatgctttaacaaatacaatctagtaatatatacatatatatatacatatatatatacacacacatatatatttgtgtgtatacatatttgtatgcatgggaatatatacatattttgtatatatatatgtatgtgtgtatatatagatacactatatatatacacacacactatatatatatgtatgtatatatatatatataaaatgggatttatcctagaaattcaggattgcttaattgtcaaaaatccatgtatttcacagtgttaacaaattaaataagaaaaatcatgatctcaatagatgcacaaaacaacaaattctaacacctattcttggtaaaaaataaacaaaacaacaacaacaacaataaaaatctcttagcaaacaagaacagaagggagctttctcaacctctgaattgtgaaatacttaatggcaaaacactgaacatttttctgctaggataaattaaaaggcaagggcatcaaatatcaccacatgtatgataaacactggtctagacagtaagacactgcaagaaaagaaaaatagtcatactagtgaaaaggaagaaacataattgtctttatttgcagagaatatgattatctgtgtataaatattaaagactctaccaaaacaagctagaactaatatgtgaatccttttgccagtggtgggtcttgcttccacgttgatggctactgactgatcagggtggtggatgctgaaggttggggtagttgtggcgatttcttaaaataagacaacagttaagtttgtcacatcgattgactttttcttacacaaaagatttatctgtagcatgtgatactgttttatagcatttatctacagtagaacttctttcaaaattagagtaaatactctcaaaccctgccacttgtttctcaactaagtttatgcactattctaaatactttgttgtcatttcaacaatattcacagcattttcaccaggaatagattccatctcaagaaaccactgtcatagctcaaccgtaaggaagcaattcttcatccattcagttctgagcatgagattgcaaccaattcagtcccatcttcaggctccacttctaatcttagtcctcttgctagctccaccacatctgcagttactttccccactgaagtcttgaacccctcaaagtcaactttttccaaactcctattattgttcatttttttacttcctcccatgaattacaaatgttcttaatggcatctaggtaggtgaatcctttccagaaggttttcaatttatgttgcccagatccatcagaggaattactgttgatggcagctattgccttacaaaatgtatttcttaaataataagacttgaaagttaaaattacaccttgattcatgggctgcagcactgatgttgcgttaaacaggctggaaaacaacattaatttctttgtacatctccatcagagttctcaggtgaactagtgctttgtcaatgaggagtaatattttgaaaacaaaaaaatcttttttctgagtagtaggtctcaacaatgggtttaaaatattcagtaaaccaggctgtaaatgggtgagttgtcgatcatattttgtttttccatttctagagcacaagcagaataggtttagcataattcttaagggtcctagaattttccgaatagctggtgagccgtggttttaacttagtgtcaccagttgaattagcccctaatgatagggttagtctgcccttgaagctttgaagccaggcattgacttctcttctccagcaatgaaagtcttaggtggcttattttcccaatagaagtctgttttgtctgcatttaaaatctgtggtttaatgttgccatcttcatcaataatcttagctaaatcttctgggtaacttgctacaacttcttcatcagcacgtgctgcttcaccttgtacttttatgttatagagatggtttctttccttaagcctcatgaaccaacctctgctagcttccaacttttctgcaacttctttgtctctctcagccttcatagtgttaaagagagttaggggattgctctggattaggctttgacttaagggaatgttgtggctggtttgatcttcttacctgaccactaaaactttctccatatcagcaataagtctgtttagctttcttatcattcacatgttcactggagtaacacttttaatttccttcaaaaacttcttctttgcattcacaaattggctttctagtgtaagaggcctaggtttcagcctatctagctctgctttttgtctgtcttcctcactgagcttaatcatttctagctttttatttaaaatgagagatgcacaactcttcctttcacttgaacacttaggggccattgtagggtaattaattgtcctaatttcaatattgctgtgtctcaggaaatatctaagcccaaggaaagggagagagaaggggaaatggctagccaatggagcagccagaacacatacaacatttatgggctaaattcattgtcatatatgggtgcagttcatggtgacctagaacaattacaataataatatcaaagatataataataatgaaaaagtttggaatattgcaaaaattaccaaaatgtgacaccaaaacctgaagtgagcacatgctattagaaaaatggtactgatagacttactcaacacagggttggcacaaatcttcaatttgtaaaaaacacagtatctccaaaggacaataaacaaagcacaataaaatcaggtatgcctgcacaatagcctcagaaatagaaactgctggggaataaatttaacaaggtaggtgcaaggcctataaactgaaaactacacagtatggctctaagaaagtaaacaaaagctcaacacatggagagagatgacatatccatggatcagaagatttactagtattaaattgtcagttatcttcaaatcaacctatagattcattgcaatgctaatcaaaatcccaacagcagttttgttgaaattggcaagcatacacatatgtgtgtgtgtgatatatatatatatatatatatacacacatatatatatatatatatatatatatacacacatatatatatatacatatatatatcttccccctggctatatatatatgtgtgtgtgtatatgtgcatacatatatatatatacatatacatatatatatgtatatatatatacgtgtgtgtatatatatatatatatatatatatatatatatatatagccaggcacagtggctcatgcctgtaatcccagcactttgggagactgagggggggagatcatgaggtcaggagttcaagaccagcctgactaacatggagaaaccccatctctactaaaaatacaaaaatcagctgggcgtggtggttcacgcctgtaatcccagctacttgggaggctgaggcaggagaatcacttaaaccaaggaggcagaggttgcgatgagtggagatcacacccctgcactccagcctgggcaacaagagcaaaactcatctcaaaaaaataaaagctatatatatatatatatatatataatatatatatatatataatgtacatgtctacatgtgtatttacttatatggaaacgcaaagatccagattagctaaagaaatttgtaaaagaacaaagttaaataactcatattacctgatttcaagcttactataaacctgcagtagtgaagacagtgtgcattagttaaaggacagacttactgcttaacggaatgaaataaagaggtcagaaatacacccgctcaaacatggtcaactgatttttaacaaaagtactaagaaaatccagtaaggaaaggatggtctttttaaaaaatgtgctggaaaaattgaacatccatgtgcaataaataaaaaaaggaacttgacatcacaccagacacaagcattaactcaaactaaattgtagacctaaatgtaggaactgattgtgtatattctggaataaaatataaaagaaagttattgtgaccttagattaagcaaagatttcttagatacacgaaaagaaagacccccaaaaaatgatcaattgtattttattataattaaagacttttatacttcataaggcaccattatgacaatgaaaaagcaagccagaactgggggaaaattttcacaaaacagtatctcataaaagacttgtaaccaggatatataaagaactcatacagtgcaataaaaaataaaaattagcaaaattttttaattgtcatttcacaaaagaatgtttaaagatggcaaatcagcataagaaaaaatgtgcaacatcattagacattagggaaatgaaaattaaaatcaaagtgagataccatcatacacctattagaatggtgtaaaaaatgccaagtgcccagccagaatggccattattataaagtcaaaaacaaataaatgttggtgcggaggctgtggaaagggaacatttatatactgttggtgggaatgtaagttagtacaacctttatgaaaaacagtatgaagatttctcaaagaactaaaagtagatctaccatttgatccagtaatcccactactgggcatgtaccccaaggaaaagaagtcactgtatcaaaaagacacctggaggcatttttgttgctgcacaattcacaactgaaaagacatacaatcaacctaagtgcccatcaaccaatgagtggataaagaaaacgtggtatatacacatcatggaatactactcagccataaaagggaatgaaataatgtatttagcagcaacttggatgaaacaggaggccattatcctaactgaaataactcaggaacaacaacaacaaaaaaaaaaaaaaatattgcatgttctcacttataagtgggtgctaaactatggatacccaaaggcatacaaagttgtataatggacattggagactcagaagaggggagggtcggaggggatgagagatgaaaaattacctatttagtacaatgtccactatttaggtaatgggcacactaaaagcccagacttcaccactatacaaatcatccatgtaaccaaaacctcttgtattcctgaaactatggaaataagaaaaaattgaatgtcaaatactgcccaaaatgtaaagcaactggaatcctcatcctttactgatgagaatacaaagtggaaaagccactttggaaaagagtatgatagtttcttataaaattaaacatatgcttctatgcagtgcagccatttcacgcctagatatttacttaaacgcaaaggaacattcattcacacaaagactagtatacagatgatcagggcataatatctcaaaattggaagcaacccaaacacgcctcttccagtgatagaaaagcgcattctcctatggtcttacaatagaatactacacagcaagaaaaaggaatgaattactcatccactaaacaatatggatgaatctcaaaagtgttacaccaagggaaagaagccccagaagacaatatttgccatgattccatttctatgaaattctcagaacaaaaaccagtagaagaaacctttttggagtaatggaactgttctgtgtcataatcaagcatgcgtcaaaactcatcaaattccaagattaaatatggaaactttgattctatgtaaatcttacttccataaagctgattgattaagagggtgcttagcagatcagctttctgagtcttcactgagtctttgcccttggaccaaattccacttttgagtgatggctaaactacgcatgggattttcggtcccactatttcttctcctccaaatgtcgaaagcattgtcttctagcatccaattgttacttttgaaaactcaaatcacagtctgattctcatgaggtgacttttttctcttgttttaatttttatgacaatgatgttaacaaacacttactgagagctgcagtgttcccaggcctgttctccacaccctactcccagcgccttgggattgctgcatgataaatccagccataacgtctttttcattgctgttctgagaactcagagaacttctccaatataaagactactatcctttgggggcggtttcttctattgtttcctgaccattattttctttctcagcatcttctgttttctgctgctagtacatccaataataggcattagagctcttgggattgatcctttatttctcatatctctcatcttataatttctcctctttccagactttttattgcttcttttattttggcaatcattattttaatctctaagacattttctgttttctgagtgatccttctccctaggctactattcttgttcttgaatgtaacctcttcttgaaagacattgaatgtgctttcagaacatttgttttatcttgatcttacattggcctttctcttttacctgctacacagacacacacacacacacacacacacacacacacacacatctctgatgatccttggttgtctactcatagataagaagggtgaggtaggtgggtgagcttcctgcaaggcaagttctccaagtgaagattctgctaagagttctttgggaggcagagaatggcagaaaaaaaattgaataacaggttttggattaggtgaggagggggttggaagagcgggtaagtcaggggagggtggggggaggagacacctgatacctaccaaaatgaggagttcagtcagtcctatgcattgtcattcaaacagaaagacatagcctttttcaggaaatatgttctgtttgtttgtttgttttcttgcctgtgttttggtgtaagggtcccctttacctctccctgaaaaataaattccggcaacctgaattcaactcagcatgaagaaacaggaaaggaccatccttaggttgtacaatgacctccaacaaatccacctacttctagaccaactctactcccctgttctctggcagccaggttgtctctgagccaggaacctctcaggccacctaccttccacctccttgccaatctcttgctgcacattctggtccatgctatttttgaattattcatgcacaagcatactactatccactctgattcagaataccttttcaccctggttgaagacctgctccctactctcttatattcgactttctataggatttttttgtgtatttgttttaactttttttcttttgtttgtacttccatctggtcatcactaccggatctaagaaaagtggagtgtaaacaactgcaccttcattgttttaaggtaaaagtcctcttcacccttcatctttttcccaccaaaactgcttctgctaatggaatccgtattaatccgttttcacactgtggataaagacatgcccaagactgggtaatttataaagaaaaataagtttaatgaactcacagttccacatggctggggaggcctcacaatcatggcagaaggcaagtcacatcttacatggcagcaggaaagagagaatgaaagccaagagaaaggggtttccccttataaaaccatccgatcttattcactaccacaagaacagtatgggggaaaccgcccccacgattcaattacctcccactgggtctctcccacaacacatgggcattatgggagctacaattcaagatgagatttgagttgggacacagccagaccatatcagaatctaccaccacagccctgtataagtcactatgataaaacgtggtgaaaagttctatgaccattttaaagatattaaaaacatttatatattccttataagttctacacatttgtcaagcaaatcaagatgaattttataataacaaagatgaatcacataatcaatttttgtatattcttacttaatacggttcttgctttgccaaagactgaatggtcagttttaattgttcactataattttggttttccaataacaactttaaaaattgctttatatatttagaggttgttaagtggggcataaaagttcatggttactctaactttataataaagtggatcttttattgaagtaagataactatagtccgttaaatttttttattttacattttattttcccagtacctaatattgtcagtgcatctttctttggtttgtatattcttagcatgcccttgtctatcccattattcttactttttctctgaaaatttgattttgttgtttctcctaagtagtaaaaaagcctctatttctatttggttttgatcgctgaaaaaaatgtaataccactcattcatttaacaaacgttttttgagcaaatgctgtgtgttagatctcatattcaaaggtggaaagaacaaaaattgtcctagccattataattgttgcaccttattttctctacttaggtatacagacgttttggtttttagctcattcttcaaatccttacctttggattaaaaggaggaaaagaaaaataataatacattacttattcattatttaaaaacaaattttcttaaaaaactagaaatacaagatctcctagagatcataaatgacaaaaagcatgcccaattttattaattctactaaacattttaatggaggttctaaccagtgcaataaagcaagaaaaataaatataagacacgtcaattttggggaaaaatattaccattatttacagatgacatgactgtgtacaaagaaaatccaaaagaatctatatacaattagaattaacatagaacctaggaaaggtgctaaataccaggaaatacacaaaaatcaattttatttctatataccatcaacaaacagaaaataaaatattaaaaattaatgcttgcattagcatcaaagtacaagaaatatctagaaataaatctaataaaaatgtgcaagacatcttcactaaaaactacaaattattattgagagaaaccaaagggaaatctaaataaatggaagatttgatttgtaaagacacaaagcttcccaaattgccctattgctctacaaatgtactacgatcccccaaaaatctaagcagaggtgtgtgtgtgtgtttatatataaatttacaagatgactcttaaatgtttatgaaaattcaaagggcctacgatagccaaggaaattgtaaggcgaaaaaaataatctgcaaaactcacattaccacatattaagacttttaataaagctataataaataggtcagtgtgatattagtgcaaagatagatcaaaaaaccccaagtgaaatagaagaaagagttcagaaacaaaacacaccaatattcagccacctgatttatgaaaaatcaactccatagtatagccttttcaataaatggtgctaagctaattgaatatctagaagagaaaaaaatttatcttgacccctatctcacatcatacacaaaaatcaattccagatggactgcagctctaaatgtaaaatgttaaacagtaaaactttaagagaaaaacatcttgcaaatgtgagtacacacaaattcttttttttttttttttttttttttttttttgagatggagttttgctgttgccagactggagtgcagtggcacgatctcggctcagtgcaacctccgcctcccaggttcaagtgattctcctgcctcagcctcctgagtagctgggtctacaggtgtgcaccaccacatccagctaatttttgtatttttagtagagacagggtttcaccgtgttagccagatggtctctatctcttgaccttgtgaagtacacacaaattcttaataaggagacacacacaccacaaatacgacgaataagaaggccaaccacagcatggtagaagaaacatacacacacacatatacacacacacacatctccagcaaaggtcttttatcgaaaaggtactagttaatttgaaaaaaatattttttaaatagataaatggtccgaagacatgaacagatagttcacaaaaagacttctaactgaccaataaacacataaaaaggcatttaatactagtcagggaaatgtaaaatgtcatcagggaagtgtaaattaaaattaaaatacaatgctctaatcatcacagtggctaaaattgaaagaatagaaaatgctgatgtatattgatgaactggaactctcatgcacccttcttgatggtgaaaattgcaatattttggaaaagtatttggcagtatctactgaacctgaccatctgtgtatctttgcctgagccattctactcctaagtgcatatgcaaccaaaatgcacagatatttttaacaaaaaaaagtattagtagatccatggcagtgccattcatattaatcaaaaactggaaactcctgaaatgccatcaacagtcgaatggataaggaaattgtgatgcatcatacaatggggtgccctccagcagagaaaacagaaaatcgacaactgccttctccaaagaaatcttacaaacataatgttgagggatagaatctggaagaataaatgcatactctatgactcaaaattatttttaacaagagtctggatagtgattacccttggcgggggcagaaacttccttcttgggaaggaagcaagaagtaccctctaggttttagtcatattcttcctattgatctacagtgcttattacacagctgagttcattgtgtgcaaattcattgagctgatcgtacagtccttttctgtgtgtgtgttatactttcataaagttaaacagaaataaaagacaacttacctttatttttttatttatttatttttatttatttatttatttatgagacagagtctcactctgtcacccaggttggagtgcagtggcaccatctcagctcactgcaacctctgcctcccaggttcaagcgatttttctgcctcagcctcccgagtagaggggactacaggcaagtgccaccatgcccggctaatttttgtatttttggtagagacaggttttcaccatgttggccaggctggtctccaactcttgacctcaggtgatctgcctgcctcggcctcccaaaatgctgggattacagaaatgagccaccgcgcctggccaacttacctttatttttataattgttggttctacatgaactgaacacaggagatactatgtttagatcatctttgtaaaatgagaatatgaatattgttcttctccaccctttttagctttcttcattagaaatatttaagcccaaactattgtcatttttagcaattgttattttatgtattgcgcattattttgcattttgtgtaatagccacgttgaccccaattatatagacttaaacatttagctggatttctgttcttattttagactttttgtagctcatactctctattcctgacttacagattttgattcacctcccatttaatcgggaaacatctttcgagcggctgttatagaaagaatagctgattcatgatttttgtcatatttgataggattggtctttcttctacctccttatttaacacttgttttctgcttattacttgtgggtttgttttttgtttgttggttggctggttggttttgagacagagcctcgctctgtggcctaggctggagtgcagtggcacaatctctgctcactgcaagctccgcctcctgcgttcacgccattctcctgcctcagcctcccgaatagctgggactacaggcgcccgccaccactcctggctaattttttgtatttttagtagagacggggtttcaccatgttagccaggatggttccgatctcctgacctcgtgatgcacccgcctcggcctcctaaagggctgggattacaggagtgagccacagtgcccagcacttgtgggtatttttttaaacttttgtttgtggacctagtttcgtttgctcttttcaaaataattagtaatatggaaattaagcatcttattactatactcacatggttggactaaaattttgagaaaatatattttttcctacttatcaacattgaaaatgtacaatatctctctactcacccttatgtaaaatgataaattctgtgaacgtcttatgtaaaatgataattctgtgtaccctcttaataccatacactctgtattctcaatcttagttgatatatatggaatttaaatatttccactaaataacttatttttcgcctttgccataaactccatagtcatatttaacacaattatcctgaataaatattgtttcctttttagtgctttgtgccatttcattttcactacatcttcccatttcttgagttctgtattatttatatgcccttcattcagctggagcatttctttgagtttttttaaatgaagggcacgtgggtggtatacttcctaagtactttcatatttcaaaatcttcaaggttgtctcaggaatgatagtctgagaggatgtaaaattgtgttttcaattaaaaataacctcttattattacaaaggcagtatatgtacacagtagaaaattagaaaatataggtaagtaaaagtaagataataaaaccaccatatttccactactaaagagattaccactgttaacactcagatgatgtcctctcagatctattgctatgcacatagatgtgcattttatcaaagtaagattatactgtgtacattgttttgcaacgtgcttttattcaataaataaatgtctacttgtccatggcattaaactgtaatatcattgatatggtttggctgtgtcctgacacaaatctcatcttgaattgtagcttccataattcccacgtgttgggggagggatctggtgggggataattgaatcatgggagtggtttcccccatacagttcttatggcactgaataagtctcatgaaatctgatggttttataaggggtttcctttttcacttggctcccattctctctcttgcctgctgccatgtaaaatgtgccttttgccttctgccatgattgtgaggcttccccagccacatggaactgtgagtcctttaaatctgtcttcctttataaattactcagtctcgtgtgtgtctttatcagcagtgtgagaatggactaatacgaccattaaatgcccaagctgtactcaaatttccccaattgtcttttaaagtgagtttgcccaaaatagatgcaatctgggtggctattcccttattttatgtcaatctggaacaagccctttttcacgatgatggttgttgaaaagagtgggacaaatgctcatcttctagatttttctactcagctctttctgtaccattattgagaagcaatcatctttctgcaaatctctatattctgcctggcctcctgtcatttagcattgcagaagcaaattcagatagcaacttaatttctgccccttcttcctgacttgtattgtctactcttgaacttcaaaaatgtcatggagcactatctccatggggagctgttcattaattatgactggttctcaggtagtcagtgagctttcatctaaaagctaaagtttttattgagctcaaatacttttttttgtttttttggtctgctctgctatttccttctggaatttctagcgcatgtgatttgaattttctggacttacctcctgagcttgtctccttcctgttctttgattcattttcatctcttttctctgagttataagaaagcatcttccagttcatggatctgggaatgaacacaagggtggaattctcagtgttaacacatgactcaagggcacgggtattagcaactccaagcagcatccgttgagttcttccctgaatcaggttctagtctgcacactgcaaggatcatctcaatcaatcatcacatcaaacctattaggcgaggattctcactaaacccattttacagatgatgaaactgagacacctaggggatacataacttgcccaattacatggctaataagtagtcagcctgggattcaaacccaggcttctcctcgctctctgcactgctgggaacctggattggtcccaccctgcctgtctcacagccctattgcccccaccccttgttagtgggctcctacttaactcctttccaggtaaattgttcatatgaatgctgccaatgatggacaggcacatcactggtctgccgctttgagctctacatttcatagaaatgttgtcaaactgttgtgatgtggctggctaccttccctgatttccagtgtggacacagattttcccctatatacattcccttggatatttccatggaaaacctcatgcttagtgtacctttagaggtttctttatctcccctaccaaaatgcaagccagcatgaccattcattcctattccccatcactctcatttatcctctttggttttgcaagaaattgacccatgtaatgcattcattgtggccttgcctcacagcccagcaccatactgtccaagtgaaatgccctttccctcatcctccccattgaaaatccttatcaaccttccatgggcagctcaaatgccaactggcccttaaagcgctccttcaccccattccatgtcctgtgtcctctccttcctcagatgtcccttaggaacctctactccccagtggcctgctctcagtcaggatcccagcaccaaacagatggtgcatcccagggaagataatccagagagagtttatgcacaaaggggtagactacaaagtgataagtgtctgttgtctggacctaacagaaagagagaagaagtcgtccccggggcctggaaggagagaatcctgcattgttttgagaatggcagagactttcagtccagggagaaactaccccaaggccattgcagagggagagagactcatccgatgaaatactctcacctcagtccctctcttcctccctccaggctcttgccatggttcccctttgtcagaaaacaaccagagggcatgtggcccagcaccccttgatataatcatgcacatcagccacctggggctgagaacagggaggagaaaggaaaggggtgagtgctgacaggcaaaggaaggtatcagctacagactctgccacttgcattgttcatggtaatcatttacatcttaactttccctccagctcttgagggtgggcaatatggctctgcatttcagtaccccagtgtctagcacggcagtgggtatgcagcctgagctcagtgaagttgcttcctcactcatgaggaagcagtcacgttatgacttcctcatttgctttgttattctagaggtggaaaagggtggcctgagtcatcttaactccattcttgtgggattgtgaattctgtgggattggggggttgggggattctggtgaggccgtggacagattctttgcaacatgtatgcctggccctttcgatgtgaaaccctgcagctggcgtcacctgtgttgcattctgaatgggtgagccaacccaggctccaccatctgtaccaggcacagggagcaccagcaaccagccactgccttgtgtcatccttgtattccttcatcaatcgatgtgttcgttcatttgttaagcactcattcagcagctactacatacagcaagggttccaaacccatatggcatcatgggaaaccattccccactcttctggtaacaaatctcacacataatccaggcctaatagtgctcatgagaaggtgagagaatgggaacaagagggaaagggatgggcctgaaggagcacagctaataagcagcaaagcacagcttgagagctaagtacacgctagcacactgcccagacacacatctcagggcccctggaataaaggtgactgtgttcacatcagagtgaatgtgttaatgagaagaaagagggcctggcacagcaactcactgttctaatcaaagcactttgggaggctgaggtggaaggatcacttgagcccaggagttcaagaccagcctgggcaacatagcaagatccttgtctctataaaaacctccaaaaattagctgagcacactggcatgtgccttgtagtcccagtgactcaggaggctcaggcagcaggatcacttatcaagtgaggttgaagctgcagtgagtcgtgattgcctgccacctggggtgatcatataatttgttgtgtcaactggaccactttacagacagagaggtgtgtggttataccacgaaaacaagcatttaccttcactgacccagaccagtcagtgtgtatggccaccctaccagaagcgccaggcatacatgttgcaaagaatctgtccatggccccaccagaatcccataatcaatgggaacaccaagaaggaagttaagatgactcaggccaccctcttccacctctaaaataacacacacagaaaaatgtcatatcatgactgctccgtctctcaacgcaacctcactcagtccaggcagcacacccacccaccaccatgttaggcactgagtacagacacttcagcctgggcgacaaagtgagacactgcctctaaaaaaaataaaagagagagaggaaagaagtcctccattctggtgttcgtgcatggcccctgtaagactggataactgggaggccgaggcgggcggatcacaaggtcaggagattgagaccatcctggctaacacggtgaaaccccgtctctactaaaaatacaaaaaattagccgggcgtggtggcgggcacctgtagtcccagctactcggaaggctgaggcaggagaatggcgtgaacccgggaggcggagcttgcagtgagccaagatggcgccactgcactccagcctgggccacagagcaagactccgtctcaaaaaaaaaaaaaagactggataaggtccttggcttttctcagtttcatgatgtgaccacatcatgtgagcttgtggcagtggaaatacgtggtcagggaggtggggcatccaagcaggggaaagggagcattcccatggccaacccacccacacagcctccacccaagggcatcccagcttggaaactgactttggaaacacaacatgtgagactgtgattttgattagaatgacatggatctgagacagctacattttttcccaaggaaaaactctctccaaacaaagggtgaaagagaatcattgtttacttatgctccattcttcttaatttctgatattcttttagacaactgccaagtccatgcagaaacagctcttctgatgtaataaatgtagactttgatctgacactcaccaaagccattctgaagaatttcagagcagaacaacttgagcaacaagtcataaaatagatgtgagccttgactttattttttttaatttaccaataaactaggtctcaagagttaaaatgagctttttttccccagaagtaaacacttgtacacactttaagtgacattttttataacattcctttttttttaggatgagcatagagttaatacccaggagcaaacgcatcactgttactgtccttagaacatgtgctgatcacggccttggctgcacacagataaccctgaaacagactctttgatctcgcttctcccagtctgtaactttttttttttttttgagacagagtctcactctgttgcccaggctggagtgcaatggtgcaatctcagctcactgcaacctccacctcccaggttcaagcgattctcctgcctcagcctcccgagtagctgggattagaggcacgcgccagcacgcccagctaattttgcatttttagtagagatggggtttctccatgttggtcaggctggtctcgaactactgacctcaggtgatcagcccaccttggcctcccaaagtgctgggattacaggcttgagccaccatgcccagaccccaatctgtaactttaagtagggtttccaagtcacctgggccaatgcctaaaatgcctgccacttgaggtgcatataatttattgtgccaaccaggccactttgcagatggagaggggtgttattcaccaggaaaacaagcatttaccttgaatagcccagaccagtcagcgtgttccaccatcccaccctgaaaaaaagatggctacatcagcgttgtgtgtatttccaccaacctggtggagacctctttattcagggtaatgatacaggaaaaagggcagggagcggtgtcctgtgtgggccagcagtagcctcaggtccccccactccagggaaagcagagcaattgcagagtcccagagactgtgcctgggacccccacatgtgggaagacccacccatattccctggcattcatcactcggtcagtttccccaaacactgacccaaaacccactcttgcaacaatatttatgagcatactttctctctctcttgctttttgacatcaattaaatgaagtattggctgcaactagtttgtccagcagtttctatgtcagcgaatgatctgggtaaggagatgactggataactcttcaccttcattttcagctgagaaaatgccagtttaccatacgggtcacattcctggggcccttggctaggaaagagtggctccattttgcacacctcccactgtttctcagtgtctacaatgctcaaatatgtgcaaaggagtagcactgttattcacatcataatggatactaacaatagtagctattacgcgtgaagcacccatactggaccaagctttgtaccaggcacttacttataacactctcataccccgataatgaaggtatatcaatctccagcctacagagaaggacactgaggttcagagaggctaactgtcttgctcaaggtcacacagctcagcagtgctggtgttgacatcccccagaatctgccaaaaggtgagaaatttcaagtcacacatttgcctttaaaaatcagtttgcctcccaagtagccttgcagatcactgctattggtgaccagactttatgcaggagacgagaaaacaggtttatgtctttctctgtccctgaacattggggagtgagttggtaaagagcatgtaccctaaagagtacagcgtttttgttctgccatcaatgagtgtgctctttaaaatatcccatttattcaccaacatggtgctggataggtcaaaatgcaaaactaagaaagacagcacaggaacaatatatttttagtgccttttaattgaagtaataatgagaattgtatccacagcatgctccagcaggtttgcaagatgtaggtgctctgcctagatcctctgtggacactgcatacctgagggctagacacgttctgatcatgcctgctaagccccaaatcacaaaggttccccaagtaccagcaacttggaggaaaccctgggaagaacctggctgacatccttagcagaattttctgggttccaacaactgggttagcagaattttctgggtttctctatttcccttccattcctcctctctgaatgagagatcctacagagtgaatatttaaggctgatgttttccacccagtgtgctcctgcagcttagaaatggacatcacggcttgaaagaccagggaaaataaacatagggccgaattgagtgagtcctggcgtgagtcaacatggatgccccatcctcccattctgagcacaaagggtgcttaaaactttaatgaattgaactctatgagtaagggatgttaatcattttaattacccagcagcttgaaatcagatataacagtccaataatgtatctttaaacgaataccaccctgccctataaaaaatcccttccaaaccattctaataatttctatttatcttttctgacgttaactgttatccagcccagccggccaacagacagccttcccctcacatttggtttaaatgcaatgccgtctagtttttcaataccattagcgtccccctggtgggcagagagcaaggcagtggcaccggtcacacttcactgctttatctcatatgacaaagagcgatgatacgcttcaatccaggccagcccggcagagggaaggtggccacacagaactccccttgctgccgagaaacgccctctgtgtgacttactaacagcatgaaggggcagacaaatagattttcctctatatttataaccagcatcattcttcctttcagggcgttcagtgcaggtagctgttttatatgaaatgaacaatctttatagacgtaccagagccataacaagcctgattttcagcgaagctgaggtatataactcttaccgaattgtcaggctgcttgctcaacaaatcaagcctaacttatgatgtttgcagtgtaatttttattcctgtttgactagccaactacccagtggtaataggatgttaggaagggcagtggcgatgtttgtgcatgccgtgattgataggccgactcggcatttttcatttatatctccagattccaaatcagttaagtttaggaaaaatgaaacaaagtggcaagaaaaatgtttgcagattgcagaccggcgctcctgccgatctgagttcagcccacatctgccgggattgtctggaaacattaagatatctaaatgaaaatcaatactatatgtgccaggcatttactaccaggaacaagcatcaagagacctgagctaatcagacttccagcttgtgcctcagccctagactgaaccccaggggtgtcctaattgcccagactaatcatagaagagttaaatttataaccaagaaagacatcttgtttttcttaccagtcatcatttaggagcggaaaggctcacctgtgaagtgggtgccagatgtacagtgggagcccccattcaagagaggatggcttctcacctgtcaggggaaaggaaagacaaatttactgtcagcagtaaaaccagtcaggctcattgaagccccaggtgggagagtattccatcagctcaaacacgcactgcagttctcctcattgaaactctccccacttaacccccatgttctggaacatgaaagccccttgcacactttgatccatggcctggtttttattttaaggaaaccgctcagaaaagcagctggcatcagtgacattaaaaatatatgtatctgtttctccctgagttccactctgtgcttttttgtcccttggagtctccagaggagctaataacacttggcgacatgtatctccctaatatactgtacaaacaagtcactgatattattcacactccaacaaactacaaagtcacacaatagcaattggacgagcccacactatactgctgaaaaaccataatgtatcaggggactggattcctaatatttgcattctagatgccaactgtgagcatattttgtactattttcaacaaattacaccaaaatatgcaaaatgtttataaggctccatcttctatttttggctccgatatatttgcaacttaatagtcctttagagatttgtttgtctccttgggagaaacaggaaagtgggaaatgaaaaaagcagaaagagagagggagaagagaaaagaaacgaagacactttgttcacgcaagttgagttctgcgagtttttcgtaaagagcggagccactctccctggagaccttcttcgacaagaaatttaataacattatttggattccttgtgtcccagatttcagatgtatttttaatgcatgtgtcttgaaacaaaacaaccattgtcaaatgctgtatcctcttctcaccagtttaaatggcttcctagacagcacgattctgggagcatcttgaaagtggtgatcaatgaaaaactgcgccttgctctctgtggcttcccaaggatgttcaccccttaccacagaaggttgtcagctctcttcccaggaaaggtgtctctggtccttgtgatgtgaacgatgacagcctcttgccttctgttccatcattattgcctccacgctctagcaactgggtgcaggcacacatctgtctttcttgtcttcaaccctgtgatatcaccatccctgactgcactgtgcctgtgtaggattagggctgatctgttcagcagaatccaggataggggagattaaaatgtacatgggttgaagagggcagcagttttcctgatgctggattacacagccaagttgaaaacttttcaatccagcttctcccactggaaaaggtgtcagacaaaaaactaatttttttctaacgttatgcctaatgaacttaacccagcttaacctagagattgggcctcatgcccttggttcctagaaccagttttcctaacaagactgaagcttcagccgaattcattacttactcagaatgaataaagccagaggaaaagatatttcatgaacaaatctgtgttcttagctgggcttcaaggtaaaaaaaaaacaagtgaaaaagagtgcctggcttcccatgtctttgtacacacagcaggccctcaaaatgcatgtgtaggttggataaaccaacacatggtggatgaactgggaagtcacttgagttggacgtacactcaaaaaaaggtaaagagaccaggcacggtggttcacgcctgtaatcccagtgcgttgggaggcctagcggggaaccaggctgggggacgagggtggggggatagcttgaacctaggagttaaagaccagcctgggcaacatggcgaaaccctatctctaaaaattttaaaaattagccaggcacagtggcacatgcctgtagtcccagctactcaggaagctgaggcaggaggattgcttgagcccaggaggtggaggctgcagtgagctatgatcatgccactgaactccagcctgggcaacagatagagaccctgactcaaagaaaaaaaagaagaggtacagaagcatattcaaatggagagactgaggcagaaaggagcctcaggacacatcaggcttcaggctttcctctaggaacactccactgctctgcacaccaagcttggaatcagaggcagccagaccttgatttgcccccaggacaaaagccaacagcctacggctgctgggcaggatgacttcaaactcattcctcagccaaacagggcctctcaggaaagcaggcttgacaaagctaggtgtggctctcaactcaggggagctgaagccttcacaagccctacgtcctgtgtcccagctccacagtcctcatgggacctgctcctgtggtcaggctcacgtgcacagtggttgctgtgaaatagcctgtgtggtgagaaaactcctggggtctcagctagaaacgctgactggggttgcagcttttccagctgtgttgatggccaggctgggaagcctgctagaggccagggagcaaggcagggccacccagacaaaacagtcagtggagatctcacccagggagcccagacaattcacaacagaaacagagctgctgcttcctgagggctttccacgtgccaagcactattcctggagttgtgtgtattttaacttgatcaatcttcaaaatggcccggcaggtggaccctattattagcccacaggggagatgagtaacttagctgcagtcacaaattgctgagggacaaaatcagggtcttgtccctgtagtcaggtgtggagtccatgcattttgcagaaggaagtctccgggggggctcaggaacagaggccctgcctaagtaggtaagatggcagagagtggacccaaggtagaaatcagatcatatttatatgattcataagataaataataatactaccataaagccacactcaacaaaaaactttaatatggaggccaagccagagctgagcttccttaagtgagatccatagaagaaggaggctcaaacggaaatgcagttgaaataattataagataatcacttgggggcattcggcagtgggactcacttgggctttatcccccgttctgacactgaccaaaagaaacagcagtcagttaccaatggctttggcttcgtctctggtattccaaaaccctgtgctctgactgtcatctcacaatcagaaaaccagaaagacagctgcttgccactcccagagcctgcctgcccagcgccctggcctcctctgggaccacctgtgcacccctacgtcaccatcacagcccagcagagtgaaacttcatcagcaatatttttcacaagacagaggccacatttgtaaagtgacccttcttctgccttttggctctagaagagaaaggggcgagagagcagaggaaggacgaggggatgttcaccctgcggactgagtcaggaggaggacgtgacttgtttaatcctaataaatcagagcatccccgggaggtggaagcaacaggggttggtgtgccagccgcgctgcacattgacccaaggcagagctcgtggagaaatgatgtcctcttaagcagactcctggagagatggtccgcatttctcctgacaaattagaagcgccgtgaatgcaaccattcctcagaaaataggcctgatttagcaatgcacaagctgcattatctcgctgcataaaaagaccatttaagcagggaagcctttaggacactggccctttggagaagcagttctgaaatattacccacctcgactgccacctaagccagtcactccccaagggaaaagccacatttacaacctagaaaaccaagcaggctttagtcaaaggaaagggtcatttgtctctggtatctgcatgagatttcttgtgcccctgtcctgctcaagccctcacctcacctccagtggccaagccaagtggagagctactgtatggggaataccagtttcatcctatccaaggtgtgttgccctgttcatggcagccagagccttagccaacccgttgaataccagagcaattacaaagcagatctggtgacaacaatgctaaaaagttgaaataattcatttgcacaaagtgtgcatgtttgaaaacttttcatgcaaagattacaacctgtcattatcttccccagagacgcactaccttcttaaaaagtatctctaatgagatctacaaatctgttgaagacagcttactttattgtgtttgtaaagataaaaatgttttaaataggttatggctcctgggactgacagtcccaccatgagggtaaggtcattttgaaatgttaataaaagttttcataaaatatgacggcgctcaaagagtaatgtttggatgtaaaaataactataaaagtataatttctaccagggtacacgtgcagtttttctgtgtcaagatatttgcccaatttctcatttgactggggttgcagcttttccagctgttttgacggccacactgggattcgatccttattagagaggtttgcagcaggctttccgaggcttagccggttatattagactttcccttgaagcaaagtcttgcactgccctgaccattatgcaaatacgcaagcactcagcctaggattgtctcagcttgcagtagacatcgctgtcctcccaccataggagcaagacaagcaagactggtaaaatcagcagggagggggaccctgggggcgtagcctcatagctcccagttcctgggctagtcagggggaacatgccaaattggaaacattcagctgtttcctattcaatgagctccttcgtatttgaagttaaccagcccaaaggaaatatctcagaaggattttctaggtgatgagataactaatgagaccaatccgtcctctctgtttgccggatcccattgactcaaatcaaccccgatatttctattaaggcacctgggacacgtggggtcccccaggacccaaggttgggaacaaaactccctgcagacagtcagttaggggaaacttaagacatgctggaatcagggatcatggatttgggacaagaaagagatggcatcagagtcctacctacaaagtgtcctggttatggaacattcagcaaacgattcctgtcctcagcattatccagaattttaggtactgatacctaacacatataattgtcatggacataaggggacacactccaccttcttcatcctcttcccattctcctacacaccccaaggaacattcatctgagacccaacagattggctgctctcctctccaataactataacatgcgacataaatgtgaggccctaagcacttcaggactattacccacaaaacctggccctgacaaataaaaatgcttttgactgtttgagcccaggagtttgagacctggctgagcaacataggaagagcctgtatttacaatataaaaacatataaacattaggctgggtgtggtggctcatgcctgtaattccagcactttgggataccaaggcaggcagatcacttgaggtcagcaggtcgaggccagcctggccaacatggtgaaaccctgtccctactaaaaatacaaaatatatatatatatattagccagcatggtggtacatgcctgtaatcccagctactcaggaagctgaggcaggagaataacttgaatcaaggaagcggaggttgtagtgagccgaaatcatgccactgcactccagcctagatgacagagtgataccctgtctcaaaaaaataaataaataaataaaaataaaaatgaattgggcatggtggcatgcacctgtaatcccagctactcgggaggctaaggtgagaggatcacttgagccaaggaggtcaaggctgcagtgagccatgatcatagcactgcactccagcctggatgacagagtgagaccttgtctccaaaaatactttagaaagtattggttctgctctatcaagattctcttgaagcagggtagtaggatgccacagctcctgagcttgaaggaatttggttggcagggggtcagggagggagaatcatgtaagaaaatgagggatggaaacaaagtttggttaatgtatcaggttcgggagaattgtgataaaatattctgagatggtcagaaaaccctctctgggggaggtggcattgaatagagctatgaatgacagtctcatgtagaagaaccccctcattctctcctgttcaccttcacgttactctgctttctttttcttctcagcactcatttctccgagatactgcaatacagactgatgtatgaattctcactgcacccccagtattagaatggaagctccatgagggaaaagacattgccttgttcactgcggattccaggtacctaaaccaattcctgacacaaagcagtggttcagtaaatatttgcgaataagcaaataaatgaatggatcatgtaaccaggacactgaccaactctctggcttgcacaacgctaagaagagacttaaagctgatggttaaatcttcttgtgtctgctcatcaccaaaaggacacctcttgtgtccagtgtctggagggaaaaattcaaattcaaatgcggaacctgcttgcaaacatagcattgtctgtgatgtggtcctgtggagtcaatcaaaagtcctgttcagacagctttttgctgtgttcatcctataaaatttcagactgaagcctgactgaaaaaaaaatgcttaagagatgttggagtcaacaagatgttgaatacctcatggcagtggtgaacttgctgtaagcctatgagcagaagttcaatccaaggatggatgcacacctattaagaatgccttggggctcagtgcggtggctcacacctgtaatcccagcgttttggaggccaaggtgggtggatctgaggtcagaagttcaagaacagtctggccaacatggcaaaaccctgtctctactaaaaatacaaaaagtagccgggcgtgatggcgggcacctgtaatcccagctactccagaggctgaggcttgagcctgggaagcagaggttgcagtgagccaagatcatgccactgcattccagcctgggcaacacagtgagtctctgtctcaaacaaacacacacgaaaaagagtgccttggaaagaactccaaaatgaaaatgagtgagaggtcagaaattagaacctaaggttccttatgactttgacatgttacaatctgtggtaggcagaataatggccccatcaaaatgttcacaccctaagcctggtcctgggattctgttaactcacatgacaaaagggactttgcaggtgtgattaaaatgtaaatccttgaaatgggagtttgccctggattatccaagagggccccaaattactacttaaattctttaaaaaaaaaaaaaagactcttcctggctttgatcagagtgaaaaatatgaagtgtcagagtgatgcgacattgtcagctttaaagatggacaaaagggccatgagtcaaagcacaagggtggcccctagaagctggaaaacgcaaggaaatgaattctgtacttgagcctctgatgtggtttagctgcgtccccacccaaatcttgaattgtagctcccataatttccacgtgtcatgggagggacccagtggagggtaattgaatcatgggggcaggtctttcccatgttgttctcctgatagcatataagtctcaggagatctgatggttttataaagggcagttcccctgcacatgctttctctcttgcctgccgccatgtaagatgtccctttcctcttccttcatcttccgccatgattgtgtggcctccccagccatgtggaactgtgagtccattaaacctctttcctctgtaaactacccagtcttggatatgtctttattagcagcgtgagaacagactagtacagcctccaaatggaacacagccctactggcagtcttagtccagtggtacctgtgccagatttcaaccaataaaactgcaagatgataaacttgtattgtttaagccactgagtttgtgggaacttgttacagcagcagtcgaaaactaatacacagtcttatgatttcttgtcccaaacaaggcaacattgtttatcagaaaattcctgatcccaaggttattccacttttgacctccagcatgataaaaatgagtgccatgaaggctggtcttaccctaagctggcaaagtaactgaagagaccagaagagaacatgtcaagttttagaaggggcattctgacccaagggagttcagtattcaatttaaatcctagaaagtatgttcttccatagaattaaattttaaaatttaatttaaatttacaaatgaaatttttcagagcaagaagccaaattgggccaccctttttcctcctttttagattggtgagattcaagtgactcccctgcgttcacagcccacacagccacatgtgttgcttaagataagaagatggaaacatcatatctgaggtggggactaggctggaggaataagcttgcaggaaaagcccattaattcctctgcagaaagctgtccttctatatttcttgaatcaggacaacagaataattccaccttcagactttgaggaaggcaatactataaaaatccatcaatttccaggccatatttgtatgggaaacttatttttgtcccaactcccatgcaacaggcctcagcctgtccattttggaaccacagcaaatattcaaacatgttgaattggaaaaggaataattgtcctaccttgtaactcactatgatttaacgtataaatgtaatatccttatattatttaatatcatctgcatgtcttccatgttgggaaacccaaggctacttcatcaaacctcctgcagctttctcagactgggacccaaattgaacttctcctattcaagatctccagcttctccccattactcaccctcagtcttcttcctagcaaaatggcctgagtgtacacacataggggctggggaaaaatagaatccaggcccagatccagtctgaggaagtccacctaacggtaatttccacatccccaaaatgtatcatcggaatagacatccttggaacttagcagatctccagagtggctccttggacctttgggcaagaaccatcatggtgcagaaggtcaagtggtagtctctcaagttgttcctgcaccatccaacatagaaaatacgcatatgatggaagggtggtaggttccatcataccgcattaattcaccagtctgattcctacaaaaacaaggtagatcatgaagggtgacagtagacaacctcggtgagatgcatgccctccagagggtggcagataagccctaagaaatttcagagacccaccaagtcaatgaagtttttgaggatccaatgatcaaagacataccagggacccggtggggtggttcacgcctgtaatcccagcaatttgggaggccaaagagggcagatcatttgaggccagaagtttgagaccagcctgaccaacatggtgaaacaccaaccatctctacaaaaaaaagaaaaaatagccaggtgtgacatagcctgtagtcccaactagtcaagaggctgaggcatgagaatcacttgaacctggagctggaggttgcagtaagccaagatcatgccagtgcactccagcctgggtgatagaaagagattctgtctccaaaaaaaaaaaaaaagtacataccagaacatcccatctgtagggaaggacacctcacatttcacactgcatctcacatttcactttgtcagctacacctctgtgggttctggaagcagctatcccacatttcagaatattgctgctatccatgtactgagtgacaggagtgtcttccattgaaaggggcaccaatcaggagaggtctctgcaacttgaccaagacctggtgaattcctcatgacccagcagacacagggtcactgaggtggaaaacgactatccagaatttatgcagtaagaaagtatgcaccatatgcaaataaacaaaacaacaacaactcatggtttacttgtgggccctggtagagacagattttccgcccacggaatgcctagttaccacccagttaccaaccagtaggagctttccatcatgaactgggttttgtcagagccaccaagttataaggtcaggtagatccagaacttatccattgtaatatggaagaattttatctagaattggcatgagtaggaccacagggcacaggtaggctgcatgagctggtagcccagacccctatgacacccactactgatccagcagcacctccttcctcagctaacacctgcggaaccctggtgacccctctaagcagctggtggagaaagaaaaaggctaatcttggttcttagctcagtgtgtgaatacaagctgcaaacagacccctgctgtgatatacagtcccacagagtcatggctttgaaagacagtagttagggaaaaattcttccccatagccgaccttcaggtggtgaatctggtaatttactctgtatggaaaaataagtgggctgacataagaatacatgtagagtcatgggtagtagcaaatggcttggctggttggtcaagagccctggaaaaggaacagctggaagactgaagacaaagagacctgggaaagagaggattatggatgggtctatgagaaggcacaagtgggatgatccttgtattacacaataatgccattagggagcagtcatcatggaagaagcagtaaacaatcaagtagaaagaatgactcggcccgttgatatgggactaatttctgtcattggtcattgggcttgcacaatggccacatgaatgcagcaaagacctgatagcacaaacattatgcatgggcccagtagcatgaacccctattccctaagacttatctagttcctagcaccaccaaatatccagcttgccagccacagcgaccaatgtgttaatccctaatgtgacttcataccaaaagaaggctaaccatccacttgggggcaacttgattacactggatcccttccatcttggaaaaggtagggattcaaattgataggaattcacatactctggatttaagtttgcctttcctggccacaagtctttagctagcactactatccaagagtttacaccaatactagatcccacacaatgttgcattgtagttagggaagatgtaagagttgaaatatgaccatgagagtggaaatatgaccacgatagagccacactggctctatcacttatcccaacaaaaagaaaactgccaactcggtagagcaatagaatggccctttgaagattcagctcgagcaccaacttggggatgatatcctggaagaataggacatccttctccagaactcagtgtaaactccaaaacaatgaaaattgtatgtttgtgcatccccaacaggtggaatacatgaggtcaggatccaaagggtagaagcaggagcggccccgctttccatccttcccactgatccatttacagaagtagtgcttagcatcctggtaacgccaggtgctgtgcatctagaggttctgagtcctggacaaggcactcttccaccagataacttggcaagagtcccattatatttttagctacagttgtcatctgttcacttaggattcttatgctgagaatctagcaagaaaggaaaggaggagatagagttgttgttacatgatggaggcagccagctgatccactagggtaccctttgtcactggggccctatcgtgaaaacagaacgaatgcaacagccatgtcgagaagggcatggtgtccagagcaccatacactttagagaggagggcttggtcactgcaccagctgagcagctcagaccaatagaagtgtcagccaaggataagaagcaaataatgacataagagtatatagagaatcgtggggagtagcaaatggcctggcactacagaaagcagagatgatgagtaatagatgtgacccaaagaccagctgcaggggtgggattgtggtttgtcccaatgacactcctcttataagtctcccctgaagaaaagaaacaaccaagatcctggaagagctgcttataaaatttattatacgaaacaagtagttctacataatgcagggggcagactgtagtgttctctgtgtgccactaattccagctcctgagagtcttggtggctggcagctcttaactgagttccctcttgaaaattgtccttagctgaagagaacagccttattcaagattacatctcctccccaggggcagccaccatccaatgactggttgatgcactggggatctggtggtttaaagccccaaactccatggcaggacatttctgcagagccatgctagctccagcatgtaccatagcatttgttgaggcctcttctgcaactttatgatggtgcaacttctccttatgcccagtcttgcttttctgactcttcacagctgttgctcctaaaagcatcccccagggaacactctacacaaatttctgaggctcggcatctgatttcttggaaacctgacttaggataaatacttcttttaaaagatggatctgtttgtgttgccatatgtacacacacacacacacacacacacacacacattccaaaacccttcctgtgttctgttcctctgaggacaaagaccaaatgtcttaccctggaccttggagtcctgtttggtctggcatccaccaatatatctctgcagctcctctccccacaccacttccttccatgctctctttcccaccttgcactggccttctttgagttgcctgggtatgacaggctttctcctgccccggagcctttgaacattctgattcttctgtgtagaaagacctcgtaatctctattctttatccaaccttcagaccaaatgtcttcttcagagaagcctttgatcttccccagatttgatcagattctctgttatgtggactcataacactgtgtactctcattcatagcacttacgagtttgaattatttgtttgtgccactggtggattaatgtctattttgctcaccattatagttctagcatttgtaccatgccccactcctagctgacaataaatagctgttaaattagtgactaagatgttaattctcctaacccagacttaaacccctcaacacaaaaatacagcctttttcaccatactctgtcttttgtgggtattctccttgcctagtgacttaaaaggtagttgcaggggctaggacacagcaggacctcaatgaaccagccctgagtttacatcttaggtaattaacgcatctatgttttctcctgttagactgtgagctccttgagagaaggcgttctctcttgcctaaacctcaagccaggagctcagcgaatgtttatggctttaaatcttcaggaagtatgaatgtaaacatctggctattttgaagtgtgtaggtggtttggtttttacttcttccagagagtttgcatcacacaggcacacaaattgctaacatagggtgttagaggtcctagggtgccaatcggctcatatttactaatcatagtctgtgctccataggaccaaggaaggagtagctctgagggaagtgtgcccctggtattcgccactgtgctaaattcacaagtgtgccagagaggtctcagagcaggaaagctgtccagtcacacaaatgccgcaatgcactctagtatagggctgacaagctcaaatgcttcttaggctgaaggtgaacaagtgagggaggatttcgcccaaagcaggcagcagggacttcacactggctagatgctgccatgcaagataggagccctgtgttgctagatattctgattttttcaagagaatccagaactggattgctgtggaacttgcccagctttatatttgtcctcaagaaagaaagaaagaaagagagagagagagagagagagaaagaaagaaagaaagaaagaaagaaagaaagaaagaaagaaagaaagaaggaaagaaagaaagcaacaaaagacattgtgctttccaaacaaaatacacccaaaccagagccaagttcatgggaagctttgggttgaaagtcagaatatgcagtctcttcaaactcactgcaagaccaggcacgtccctagaaaaggtgtgcctcagtttccccatctgtcaactgagtcatttgggccagatattccagccgtcacattgtgggtatccttctggatgtgaggtagaaatcctgctccctgcctggcaattctctcaccccaaaacaaatcattttcatttacaatttgaagccagtgactagaaaggtattttgccaggatttccatttctttcaagggctaattacaaaagacaggggggaaagctctcaccatgctctctttcacatctcattacatttattcagctttattactaatgctttgttcatataattttcaccctgggatctacacttttgtgcagttaccccaagtcagggaacccgccttaactccagaggtcttcatcacctcctctggtgttcttaggattttaaagtgacaatctttgtgttcagaaaagctttctgagcagagtgtttttcaagagcatgctgtcctgcccaaggatgaggctgccatctaaggtggtccaagggacgcctggggacttgctcccaccatcaccaagtccctgtctcaatccgggatgcacagacgctcctggggtggcctgcgttttggaggctgcccaggaggagccggaggaaatagatggcttccagagtcatcctaccccgaatctggactagaagctatcgtgttctcctgaaactgtccagccccttccacagatcgtcacacaccttctccagcacaccacccccggccacctccacgtgttagtgggcaaagccaaggctctgattttggaagctcgtctcggattgcttcacatggattcaggaaacaagtcccaaaagaagccaaaaggaaaactacaggaaatgtgcacaccactcaccatgaaataccaacccaaaggacaaactcggtaatcccaccaatgttgtcccaaacccgtgatggctagcagccgacaaatacccgcagacctcaatccatttttattgtattcaggcctcagtgttgtatttcctgcctccccttagcaccacacatacagtgtacttgaaaacaaaaatctataatattgatcccgcaatgtcaccacaattattcttttgaaacagccattgaaaacaaattacatctgcactgccttttcatccgcccgctgcgagtgagcaatgctcactgcggtctccagcactgtggcgttggcactgtgtcaccgccgacaggacagcccagggaaaggtggctggggggggggggttcagaatgaaaaccagagcgaagggccgatttaggagggcacagggtctctgcctggccaggcagctcaggaggggtctggatccaggatggctgcaaactcggtcaatctgagaaattctaggtcttcatatagggctactgtcagggcacaaggactccccagtagaccaaatgcggtagttgggatgattaaatcaacaaagatttagccaaggcctttcggatactcgctttaaaatctaatgacagtaagtgttaattgaagcaacatggtcgtcatctgagagctcgtaattctaccgacaaattaaacctccttaaatagaccattgagctcaaagcaggagagatgcccatggtcctagctgtctgccacccccaattccaactgacttcaaggtgaccctcctgaagaaggccatgttgtccttttcttccagcaagctgcatctccagagcatccagaggtagcagagacctcaccagtcgcctgccatcctgccacagagctgaggattggcacaaatgtggtgccccagaccccagcaagatccctgatcccagctgtaacacaccagccagttgccctgagaatgtctgtggttgggggcctgcttgtttgttttagattgtcatacttggaaaaattctctctgtgcaataattaaattccatgccaccgagtggtgggcaaagggaaattcttttgttaaggtttgaccacacaagtcacagcggtggctctagcagccgggaagtgataactttggagcattaaaaaaaccaatagccttgttgacatggacatgggaacctaacccctgaagcctcctggtatgacgcattgattttcctgtccgtgtacagttctaaagccatccattctgtatggtcaggactcaaagggccagagagagggaaaaaatctgttcttgccgctgtacctccaggcaaagttgagaaataaattctacattttgagagatgatttgttcaagccatgtttaagagaatatgattgcattaaaaaagggaaaaaatattttgttaccctgacccccgtaacctgtagccactgatcctcatgcaaaatctagatgccatggacagcacagtgtagagggaggatggtggtggaagggctgaagagggcgtcaggaactggggtgctttttttataattctccaaataatatcaccaagctgccggataatttctcagataatcctagcatgtccacctgtcattgctccgaccctctgctactgttgttttgcaagaatgcttctcctttttgttcaagggtcccttgagaaattgccacattccctgcttgctttccaagcctctcttttttgcagctaaaacaggccaggcagctcactcttcagggtctgcctgagaggcaccccgacctgctgtccccatgccatggcagccagacaggacaaggctccccagagagccttccagcccctcctcccttcttctgtgcaccatggagtcctcattcaacatgtctctatgtgaccaaaacccctccctgttctcagtagtgatggggagagggatgctgggtgaaggagagagagagagcccaggctatggggaaatttgctgagacaccgcaggggattccatgtgcggttggcttcgcatgttcagtactttttgagtgtttagctattttagttccaaataaagaaaccttcagtgccggtcaggaggtagagctcacagaagtagaagactactgtttgagctgcaaatttgcagtgtcgttctgcaaagtattacatacatcatttcctggtgcagaggaatattgagctatttcagtgaagccaaaaaggaaagaccaaaatcatgcaattttcctgacctagacagaactacggacggaatacagaaatagcaaatgctaaaatgaatgttcttacaagatctgtctatataaacatagaatccacatatcccaagtgtatgcaatgtgaactcaacatcagcatgcatgcacactagttaaagtcataaacccagtcacacaaaacattcctaccagatgattccatcttgccagacctataggagtattcctaaattaggttggtgtgaatgtgtttgtatatttattattaaaatacttactgttctgccttttgaagtagatggacaaatgatttaggagtgtaaatagactagaaacaaaattaatgcaaataatgtgttgatttttttttagcttgattagccaagccaatggaaaattctagaaaacgtatacaattattttaactgtcacaggctggcaattgtaattgacatgatttgtacgagatgcagtgtaataactgaatatattaaaaaaaaatctcatgccttgattaccaggagaacattactagtgccacaatattattaacaacacaattatcgtggcatccccaggatacgctcttagcacttcaatgcattagtgaacctttgctaacgaagaaaaaattaaagtacagcaaatttcaaagcaccagttgtacccaatatcattaaaaatttataaaacttcccctgaacatgacaagtgtttggtttaaatgaagatcagccacaaggagaaagcagaaatcttgttattctttgtctcctttcttagcctccctctctccctctctcttttccccaaacctcccccaaccagcaccacctcaatccagctgaaatatgtaaccattacagagtgacagcttgacacacaatgacccgtcagaacattcatctcgcaatgttttattttagtgaggagccaaactgcagaaaaaataagcaagttgtttcaaggcttggaaggagatcaaacatttctggcatccccacttaccagacctttgatttacaatggacttgtcagagcccgattagacagtgtgtgcttaaaaacctacagaggctcctccatgccccagcccaccaccatttcccccaccaacagcatgcctttgttccccggaaccagcaaggcaggctaaacagagactttgcacccttgcaagaggaccagggaccacgtaaaagccaaataggctgcaattaaattcttcttgccaaggtgaaaaaagaaagagagggtcagagatgtgggggagacaggcacagagagaggcaagagaaaggagagaaaaagagaggatgagaggagagaaaagggatgaagggagaggagaaggtacaagctgagttccttctgctagtctctttacctctccttccaagtcaaaagttatcatcttccccaaaaaaaaaaaaaaaaataccctgccattcctaccaccagtgagctttctcaaccttattcaaacgagaacactcagcttacaaaaaaaatgaattggaccaaaagtgcaggtgtgtaaaatatgttcacggtattacgatttttgctagtaattacaactatgaaaatggctggaaatatattgtttcaatttgtatggagaacaattgcagggagagagagagcagtgtgatctgtgcctggcattggaatgtataattccttaaccctatatggcagcatggggcttgctggagcaaattatgaatacatgtgtttggagagtctgaatagtaaatttgggttttgcacatccataacaatgcaatctgacaagtgtgatttatggaatattaagttaatacagtattatgaaattagcttaatgtactaaagctgtaattttaaagtgaaaaacaatgcaaccagatgtaaacaatatcaacattagcattttgtgaaagctgaaaccaactcactcaaaatgcgtctgtagagtcatggagttacctcgcccaaccaggcccaagttgttgaaagtttcagacaccagaataaaattccctactcagtaggtacagctgctttctctccacccaaagcctgctgtgcccgctgcaatattattaaccacaccacccccaccccttgggggaaatcatcagaaattattctgagctcttcagactagaggaactggtgataactctgcaggctgagctcaaagggcctccctcctggcactgcctgcctcacccacaataaccctggagttgaactctgaggagaaagagcttggtgccagatgcaatcccaggaactcagggtttcaagcctgcaatgaaaggaactccaaggccaagcaaaccgtgtcgatgtaaaacagcaaatctagcagcgtagtcctaagactcctcagaggggaggcctaccaaagccacagagacttatgacataaaagagaactagaaacctttgggctacatcaggataagccatcctgaagcgcagtgtggctgcgtgcgggccagcccaagatgacagaaaccggtgagcatgcacacagtgggcttcccctgggctctgctatcaaggactacaggccaaggggatggatttgggccagatgaaggttccccactgtcccctaaccctctccccaatcccatttcacctctcatctcccaaggacagaggatttattggaacagtgcctccaccgcagacagatgtctgaaactccaggacagaagggaatgttatggtgcttgaacagtgtgaagaacccattagaaaatatttccttggctgtctttgctttcaatcgagattgctagaaatgtcatagatttaaatgagtggatatgtctggaacccaaacatggccacccttgggcgccattttccttccctgacccaagcatgctaccccttggagagcaacagggttgtaacccaaacacagatctccgcagatccttgaggaaataagattaaagcactgttcctgggttccactggacataagggcctggtcatcacagtttactcagattcccaagacttaggattaaataaagacctctaggaacagagaggcaaaaccatacatattggttcctgccatattgttgaatattaagcttatttgatgaaagacaggattcctgtctgggaccaaaaccagattcatttctctaggaagatatctcatatgaaataccttatggacttccttggcaaaggtcagaccccaaatcccatgctgtggtgacctccacttcagagaaggcccagtgcatatacacactgataaacactgatgttcgagtaagtatatccacattagatttttacagcattttctttttaagattccctgtgtatggcttaatgtggtaatcaggattatttcatttatctagcatgtcacagtgccttcctatacccatggtaaaaataagagcattctatttaaaataaaggaaaagtatatgtcaaagttagagatgaaacagttgccggagtccacactggagaaaatcaattcacaaatcttgcagcgaggttctgtgcctctcctgccttgcaaaggcgcccggctgttttctgctgtttattgggttttgtttttaagatgccctgcatttataacaggagctagagaaccgagagctgaaagccaatactaatgttttaattccatcaagtatgtttcaattcctattttgcattttgcattaggcacccggactcagtcaatacttcacagcaccgtggcttgcagccgggcacaggggcttcacctaagctgacaaatgattatgcttcacaacgtgaggataaacagggcttagagtcagaagcctgctcattgctctttcctgctacaaagaacaaatacattgtctagtcacaatatgtttatttaaagagaccaccgtgtaagttgcttcttcatgtgacttccttttcaggaagccacctttcttcctccaaaattattaatctccaaaaataacataatcctccatgggacagtgagatgttctacctcagtgttacaacccaggaaatggagacatagatggttagtgtcctaccacctctgtgagtcctcactccagtccgaggagttagtcaactctctcttttctcagctgaagaatgacactgtgggcagctttcttgattctgaaagataaagatgctacaaacttaaaaaaataaaataaaataagtatacgtctgctccaagctcaaattgctatttttggtcccctccttaaaccaggaaatgttcggtatcttagcctctatttttttctgcatttataaatccaaatattttaactagaaaaaaggggttgggtagtaacaaactctgacacaaagggtcgtcattaaaggtcctctaaattcaaactaatataacttttaaaaaattacacaaataaactcaataaaaactatacacaatacacaaataaaaagtgtggggatgggggtgtgtgtgtgcacgggggcgtgcatgaaacagatgggcttctcgaattctctttattctaataagacttatgaaataaaatcagaatagatgctttatctctaaaaagcagttttttgataaacctcaaaatcagtcctcatgttcctacttgcgtcacacagtatcagaccagaccttgctaatttctctggaggagtcaatgattcaactccaggactgacagttgtataagtagaatctttctgaaaatctgcctctcaattgcagtcacaggagtaaactggtttacttgttctaagaacagtggagcaacatctgtagctcagaggtgagaagcgatggaaagaaaaataccctaagatgggctaaatgtccccagacccgaaccttaaggcctttctctcccggcaggtacatggccccactctcgccccacttagcaaattatgtataaatgaattaccttcctgggctggttccctctgaattactccttggcttctgagtggttttccatcaggacgaaccttttcctctcccttatgcaccagcaaacatactgatacaatttaaaggtcatgttcttttcaaactgacagagccctccaaagttttgacgagaggccctccaaacctcacaccctacaggcggaaaggaattaagtaaagcatcacttgctggaggctcaatcatgtgaaatgattagaaaacgcatccatggagaagggggcttctcgaggtgactggctgctcatcccgaaaggagatgtcacaccgcgaggcagagtccctgccactgggggtaccccaggagggtcaatgaagatataattactttcccacaagaagtctcttcttttcccagtccccagtggatgtcacttaattagcctcgccttttttatttgatgatagtccacctttccccccacaccccaagactgaattaatactatcatttcttaggcttagaaggacttttacttgataactacggaagcaccgagaggatggattctgcataaatgtgcgttgtgtgtagacattgacatgtttatttacaggtgtatttgtattaccaggaggatagacggttcgtggtgtctttttctctttcttttttctattttttttctgtctttgggacaaaaagaggatgactgaaatggcaccatgttgttgatggcatgagcagatgctgccttctgggaatccaaccatggcactggacattcttctgatatcattattattattattatttgacatttttgctttgattactttgttcatcttaaaactgccaaggttcacctgagatgtgacacttgcttgaaggtccgagaatcaccagatgctctgtcttaaactgtgtacatgcaatgacattacctgtcacagaaaagggaaccttgatgaaaaccccagacagaaatgcaatgggtggctcacacgccccctaaccctgctgcagagttccaggcaaggccctttgtctcgggttctccttcctgcctggcttctcctgattgatctgagcatccctcctcaagagaagccctctgtaactctaggatttatctttgggctgaaaaaaatgatgctacctcaaaacacttatacaccaagaactgaaataatttagcccatggaaaacaaaataaaatccttgttttgtcatgatttcacatgcatccttaaagtcagcccagggcttgttaagtttttactggaatgactttgctttgaaacttccctcctgctttaattgacggatgcacacaagaccacagccttggttggccctgtcatggaaagctggggctgtgatcctggaattcagtcatcaagtagttttttggcattgttcttctgttgacttcgcctctccctgtatcacaccagttgtctttccaaaaggaagtgtccctttccttccctctgcaaaagacacaagctgctctcacccacttcctccagccatcggcacctctgttttcagaccagccctcatgaccccagttagaggtgcacagctgttcctgccagcccttcctcccagcctccttcctacagatgccaccatgactgtcacacctttaaggtctgtgtgtcctgtgaatacaggtctaacttgcgggacacagagaggactttgttgagcaggtggtccttaagttcaaaatctgaattaaggcatgtacagcagcacagtcatgggaaccttgttcagaaaccataaaaaatccacggatgttctcgtggagaccacacttcatgctgttaaaacttgaccatccaaatatttcctatcacacctttgcgtggtcttattgtgtgagtggaggagtgggggcaaggcagtcaattaaatgtggatcaaataatcaatcaccattgactgggcaccttttgttgcccagcactctagctattggctggaaatgctaaaataagatcctgtcccactctcaaggagttctccatgtgaccaatagagagccacctaaacaaaccattaattgagtgctcctcctgaacctgccacagcttaatagaaattgacaaggaccccatgagaatctcgaggaaaagcagcaaagattttggcccctctattttaactgggtctcttttttaagtgactgctgcactgagtcactaattcagtagaacgctgtgacaaatgctaggaccaacgcaatccagacctagacctctatctgctttcctcctagaaagaggagtttcaccttaaagcaggagggaaggtgtttcacacaagtgggctctttgcaaacttgctaaatcagtcttcctccatttctggaggaaaaaatctgcacggctgctcacaaatgccagaaagggaaagaatccaagaccttgaaatagctgaggctctttccttcatttaaaacttttgttcctggaagaagttgaaggatgttttataaatgttttaaatgcatcgttcaaaggcaaagctccttccttctctggggaggtgacccttctgttctctctgctgatgtcaggcctgagctgtgacctagagggacagcagggctggtgacgtctttttacctccacacccacgaaatggcgctctgtcaactgggggaagaggaacagggctgtggttgtttaaggggtcttaagaagacaaacccaggccacagagtttctacgttttaaacctttcactgcacttttccttattgtccacatctgccttttaaaatacttttcatggaaattttatctagctgttttcatgacaggcaaacccaccgtgcaacagccaaatctgaactaagcatttgaggaaaaacgttctcagttgtgtcaacggagaaatgatgaaatgaacaccagatcatgttagtacagcccgtctgtctgaccgacactgacagccccatctcttgaacacttaatgtgtacaaggcctgtttaagccaagaggaaagaactcacaggggtagacccggccttgaaaggggtttcattgagtggggctacactggggatgtgtctgtaccttggacaacgcttggctgtggctctgacacccagcatgtttcctgtgaccaagcaaagtgctaggggctgtttatttcacctgcatgcagatagcccgcccggacaccaccccaaaaggatgagcacaccctgagaccagccatgtctagaggccaacaggaaagggtcatcagaaacccactgttctggtgcttcaggataaatcttgcctatttcttcaaagatagagcatcatcgaactggatgatattttcttctcctttgcaaaagcaataaaagctgccggtctgggctgtgtatcctgcctgtgctgctaacaagacacattcctttttgttcatggcgagtcatgtaagtttctgtcttatgtcacaatttctgacaagtgcttgagcacaaaaacagtatcttggcaccaagaaaatgaccatcacttaaaaagatgaaactcccaaggacaccaaaagggtaagatttcatgggagatatgcaataggaaagccagcccctcccatgtccagaagaccatccctacaaatcatgtcagaatcattctgctcttatcaaacttcaaggcagccactgctgcaaaacttccctggttcaaaccaaccacttggcccagagttgatgtttaacacttctacacatctcatggttagcttattgggaaagcctgacttggtacagccctgttcttttttccactttttaattattctaattccttgtttttcttctaggtcccttagaagactgatttctcagccaagcatggtggctcatgcctgtaatcccagcacttttgggaggctgaggtgggtggatcatctgaggtcaggagttcgagaccagcctggccaatatggtgaaatcctgtctctactaaaaatacaaaaaattagccaggtgcgctggcacgctcctgtcatcccagctactggggaggctgaggcaggagaatcgcttgagtccgggaggtggaggttacagtgagccaagatcacaccattgtactccagcctggccaacaagagcaaaactccgtctcaaaaaaaaaagaaaagaaaagaaaactgatttctcagttcaggctatctcttctctctgtttgtaacacaaaagacttatgcctctgaaggacgttgtagagagaatattgcgatgggaaacatacaactttgaatttcattacatcacaaacttccttctcaaaaatataacaccagttagtttaataaaacatggcatctacggacatacttatcatgcagaggtgcaataagaaacaatcatattaactgaaaaccatggcttatttatgtattaaagtatattatgtacatctgcacccaaggcctctccgactcattgccagatggaaatggggaacatggtgccagccttcaccctacactgggaagttcttttccctgggcgaatgtatcccttctgcctacctgctcacattccaggactcctgccagtttacctacacccatctggacttagtgacaacatgaaatccaggctggggtatagcagagccctccctgctctgttcctggcctttgcattttcgagggtgctgggaacttatcagtctaaaatctatgatgattttatcatagtcactagaaggatccaagaggaagtgaaagctgaaaggaaagcacaagtaaaattctcactccaacacctgacccagaaagcctttgggttttgaggggtgagcatgagggggttgctggttcacctaagaccctctccattcaccatcacgtccctcggtctcccccgatggagctgtttctgagtcttacaaggcaaatattaatttggaagtcaaggtcctatttgcaaaagaacagacagacattctgagatcaagttcagacttaatatactgagtcttggtggtgttgtctgctgacaggatacactgtctttaatatctctgcttaaaatattaccaacaggctgggcatggagacgtggagtttgagaccagccctgagcaacatggggaaaccccacctttaccataaattcaaaaaaaaaaatttggacaggcatggtggcatgcacctgtagtcccagctactcgggaggctgagatgggaggatcacttgagcctgagaggttgaggctacaatgagccaagattgtgccaatgcagtccagcctgagtgacagagtgagaccctatctcgaatatatatatatatatatatatatatatatattccaacaacttaaataaataagacctagtatttgctagcacaacagggtgacaatagtaaaaaataattatttgtttaaaaataactaagagtataatctaactgtctgaaacacaaaggataaatacttgaggggatagataccatgtttacccggatgtattacacatagcatgcctgtatcaaaatatttcatgtaccccataaatacatacacatactatgtatccacaaaaattaaaaactgaaaaaaattaaattaaaaaaaattaccaacaatcagattaggtcatcttctgctctggctgagctatacccaagatagataaaacttcaaggcttcagagattcaggaagtgcaggcagctttgtggagaggcagggccgtgtcacccaaccatgcctactaatcaagagccctgactcccaccagcccatcctccctgttccactgcaacacctaactcagaagacatggcccactaaactgggcaaaacctaggtgcacatctgcacccaggcctctcccacccgtcgccagatgaacacagggcacacggagctggtcttcaccctacactgggaagttctgtatccctggaggaatacatccctcctgccttcctgctcacgttccaggacccctgccagtttacacacacccagctggatgcagtgatgacagaaaattcaggctgggctgtggcagagccctcctactctgttcctgcaggggaacatggcatagacccccacgacgagcagagccagcttccagcctgcacagactccaagccttttataaaatcaaaatgagcctcccttaaataagggaagcaagggaggggatttcagctcttcctttcccagagggctggagccgatggcctcgatgacagcctaggcattcagttggcttcgcctggaggaagagggaggcaaacgtgcctgaatgattctccccaggaaagggagagagtaggacaacttggggaaaaaacgttcctgcagggctgcaaaaatcagggagaggcggcagggcaaggagacaggcgtatgtatgtctgtgtctttcagctaggcagctcaatctcaggttattttatttgacaaataaaactaaactgcatatttatggactaatgatgtgagatattgctcttttattcgtatccactgctgtttaaagaccaactgtaaatattcctgggactttttgcaagttggtgtgacttaggtaggcagcccagagcacaaccttgcagccccattgacaatagcggcactgcctcaaggtcaaggtcaagatcaggacgtcacctcctttagcaaagtcagctactcattgggagcatttcctctcaaaagccacagattcacgtatcctttcagcaacactcatgcctggctctgtgctggcctggggctttcagagccatctggaggatgctgggccctagtcctgctggtcaaacaccatgaggcgtcagtgttgggggcaggagatgatggagtgtgatgaccctacccccagaacggggataactccccactcctctgtccttcgccatgggccagtgagaagccatcatgcagaagggcagtttgttggttgaaggcatacagtggcaaacataatgtgttctctgtcatttgatttaaccactcctgccatcaaaaataggacagggagaaggaagccaggtcaccttgtctttggaggaaagaaagagttctgggaaatagtaagacaagttacagggagggtctccatgggtccatgcatcttgcccagaggacagtgggctggtgggtgggagtgggcagaggagaaggccgaccctcaaacccagcagagtcaaggcagctactaggagagcacagtgttctcagacttcaagggttgctaaaggtgctgcctcccagctctctgcaggcctgggtggtcagagcaggctgtgtgctcagaacaggtagggccagcaaaataaatgctgcatggttgacccccgtgccacctttatgggctggggctgacactggggggtccctactgaggacaagctcagtttaggggaaatcccagccagacaaccacctggtaaataggaatagcccttatgtgggcttagagaagacacagatgagcatcattcaaatggaacctctcccctgctgaaatcccaccaaggctaagggcctgctcagggagtcaggcatatgttggtggggacagagggcttcatacagcattaatctgtaagaagctgccttcacagcagctcctgctcaagcattaattcatttttacttcccgtggtgataaagacacacctcaccattggcttttctaatgacagatgtcgtcccacggccctgctgtggtcctcaaagatttggtgcccacagccagggatattgctcccgcctctagccttctccctttgctcaccagtctgagtcatctcttacccagctgctcacccaaaactaaaaataactgggcaaatgcctaaaactgctcccaccctaacccagggctcctccaaagatctagaagaaaggtaggaagcccagctttggcctccatctccagcctgctgctggcttagaggaagatgcctgagtacattccatgcaccaagtactgaggggctacagagatggacatagcatggcctcggaactcagaaacaccacgcaaagccacagaagtgctgcaaagagggtgttttgtccaacagagtcacgtgggagagaaatggatcctgccagggaaactgagaaggcttcatgcaagaggaggtatttcagaggagcaaaacgtcagtagacaaagaacaaggagggtttctcagggaggggagctgtgcaagccaagctgcaggcacagaaggaagctgcagtctgtgaactctccatgagagactggggtgagaataaaatccagtgcagctccaggtggaagaccctgcctggcccagctctgctggcctcccagactcattttcaaccatgggcctctgtgtcctctaagcttctctcaagcttcctcctctcaccttagggcctttgcagattctcccactctcagcagtcctcccactccgggccttcccttggtcggctcccccggactttcaacattcaactcaaagacctcagtagagctgaccatcatgttcatctgagggattttcttcatagcacttcctgctctctgaaattatcttgtgtttgtttgcatggtcagcatcttccctaaagtatataacctccgtgaaagataccttgcctgttttgttcagaatcttcagaggctgggacaatgtccactcacaggaaaccctcagtggccatctaaatacctgatgagtgcatgagggcaggagggagtgaaggagggaaggaaggaatggctaacataaggtccgtcaaggggcagggagggaaaacagaaggaaaggcaaatgagcctctttgtggacttggtgctgggcactggaatttgtatctgcatggcctctctgggagtttgtaaaagcagtctgagaaactcagggaggtggaaactggccagggcaaagctgatgggctctgtgcagaaatcactgatcagccaggcatggtggttcacggctgtaatcccagcactttgagaggccaaggggggagggtcacttaaggtcaggcattaaagaccagcatggccaacatggcaaaacatcatctctactaaaaatacaaaaattagccaagtgtagtggcatgtgcctgtaatcccagctactcgagaggttgaggtaggagaatcacttgaacccgggaggtggaggttgcagtgagtcaagatcacggcactgcactccagcctgggcaatggagtgactccatctcaaaacaaaaagaagaaagaaaagaaaccactgataattttccactttgggatggggtaagccacagtagttgagacttcctgacctacacagagaggccactgagattctggagccgggcagttgatgaagttgaaaagaaatttgctctctgtgtcagtcgatttgcattgttataaaggaatacctgaggctgggtaatctataaagaaaagaggtttatttggcttatggttctgcaggctactcaagcacagcaccagcgtctgctcggcttcttctggggaggcctcaggaagttttcctagtggcagaaagcaagcggggagctggcgtgtcacgtagggagagagggagcaagacagcaaggaggagatgtcagtttctttaacaaccagatctcccatgaactcattactgcagggtgggcaccaagccattcatgaggaatccaccccccatgacccaaacaccctccaccaggccccacctccaacattggagatcacattctgacatgagatttggaggggggaaaaaacatccaagccatatcaacctcactccatcacaagtgcttgcaggatgctctacctagcattcctatgggagtcttctccaggcctccaggtgccagatccttctggaaaacaggctctggaaagaggctgtgttggcttcccagagcaggctgcagcacagcccagccacggcaccaaccccactgcacgtgggaagtgctagttcccagcgtgacccagctcagactcacagccccatcagaactggcacataccccaaatccatgtgagaacccagtgatagattccccagttcatatgagagcttccagtagactctggaaagtccgggccctccagagaagggtgatgtcaaggatgcagaggaggacacagggagagaagccacaggtctgtgttcaagctactgaggacccagtgggcaagagagaggttcccttgtgccttaggagtgagaatttccaggccacctgtggatgagttcacagcttacaggaatacctgttgggtaaagagtctgcaattactcacacttctcagccactctgagaaacttttaaccacaagacctttgagtttgagtttaaacactttcaagcttttttgcaatgttgggcaagacagaaccttccagtgacctactgtcttaatctgaaaatactgaggctgtcacccttttatgtctttggactgttgagagaatgaatgaggtcagtgtgcacctataccaggggctcagaaattcttgacccccagtttgtggtcattgagtactcatatcccttctcccgaatatcttttgtgcctctcttgcaatgtcctgtccgagaaaaacccagcgagcccttgtgtccaatggctgagtccagttgaacatcctcaagcaccctcatgacccacgctagctgaaagtcgaagccactccctgtgaccaccactcaccctctgccctctggccctggtcccctctgaccaccactgccccatgacttttttccttctctctctgcatttttaccctgatgaaattatttgcctatttcttcttcatcccagaagagtgggtgttggagctttgcaaagtttgcattataagaaaccaatattcggggccacagaacatcagaggtttggcccacatgacaacatagaaaattcccacccaccaggtttcctgcagctgctcccctcctgcaaggaatttgccaagggatgtcggctatagaaagagcattccagaaccacgatgatcaaagtttcattggacccaagggcacaaggtggagtgggaagggaaggtcctctgcagaactctttgtatttggaaagaagaaaccaccaggcaagactcccggcatcctcccagccagggagaggctgaggcttggggaagttgggtgtttccctgaggaagtaaaagatgaagcgtttgtgttttgtttgaattgataatgatgtcagtttcagttatgggctcattacaacagacttgggacgtattaacagctctttaattgaatttggaaataagaaggagggttttgaatggtcttataaatagtggatgtgccggcctctgcagcaaccgtcttcaacattaaacagggagagaggagacaggggatcccccaacgtcagccatttcttatcctccacagggtccccacatgcccactgtgagacaattgttatcattcctgagctgagcttgtgggtgctaaggaaggcattcggaccaggaagcccaaatttggacccagagagtaaaaacagggctggtgagatgtggagatgcaaccttttatcttctctttttttatttatttttattttattttattttattttagagatggagtttcactcttgttgcccaggctggagtgcaatggcacgatctcggatcaccgcaacctccgcctcccaggttcaagcaattctcctgcttcagcctcccaagtagctgggattacaggcacgtgccaccacacccggctaattttgtatttttagtacagatggggtttctccatgttgctcaggctggtctcgaactcccgacctcaggtgatccacctgccttggcctcccaaagtgctgggattacaggcgtgagccactgcacctagcctatcttctcttctaaatcagcaatgcaagataaactgctgactgtccagcccccagccccctcctataatctccacagggcccaaggcacacggtgatgggatggcctgctttcctatcagccaggggccctggccacctcctctaggaatcctgggtgcctgccccaggccctgagaaaggaaatctagacaatcctttgtagagtgaacaagaggatgacctaccacctttgggctttcccttttgccttttctgtttccctcaccctttcctcccttccacctgctttctccaccacacgctctcatatcaacccctatgcagcctcttccagaaaaatccatgttaattatccaggatacatccttctttatttactccatgactatataaccacatacaaatatgcatatttactcatacttgcatgcatacatatagacacacatatacatcacgtccatatgcattacctgtctgaggggaggggagagagttgacagattttgcaaataaaaacacaggacatccagttacgtttgaatttcagataaacaacacacagcttttaagtcatttctagattatttcttgtttatctgaaattcaaatgtattgagtgtcttctattttatctggcaaccccgggaagaaggtggctttatttttttgtaaaatctgatcacagtattcacacatgcactcttgagatcccatagctatctttccaggtcaacaggcagtgccctagtgcattctttttaatggatgcataatattccatgttgtggttattcctcaatttctggataatgcccactacgtttggttaactgtactgcagtgttgctcaccgtcaacaaaaggaacggaagacaatatggctggctctgtcatgcctccttaaattagctgtcatggcaaagtcagaccagaagtcacagcaagagaacacatcactcagaacagccagccccaggagagcctgtggctgcatcaagcaccctgagcggggaggagggatgacaaaaagaactgtgaaatgcccctttccaacaaggaacataacaatggaaacagagagatgcctctgactccaggctggaaatatgctcaaatgtagaaattcagaccaactcgtttgccaaaacccacaccagcataattattttgctcagctccccccaccccaccccaaactccttctttcatcagtcatatctttaacttcatccttgttgctgaaaacacaaaaataaaaaatacatagcagctctgttgacattacagcaacagcataagcctcattttaccaaccatttaactctctctaaggaccccgttcagagacacgggcacgttgatgggagctgtacaaaggtcagtgatttggaggctcttttcgacaatttgccaggattttggcatttgtaagcatccataggacagctctctagcaagctgaccttgacagcgaatgggataaataaaccttcaatttaccccctccagctctccgcgagctgggccagtccccacggagccttcacctgtccatatcgttcaactgcctgcaacttccaactgacgaacatccacagctccgcggcccagtgacaaacaccatctaacagataagccttctgaaaagtcaaagccaatactgcttccattgaaaatttaatgccagctccatctttgcccatcattcttccgactgttccatgtttcccaagaggcccttgaagctaaagcactgctctataacaggtaatgacgtagcatttaatgatactgtccaaagtgatcccggtctttgggaagtaatgtgcactcatgtaccagataagcaccgccaaacgtactgagccgccatatctttcacggccctgtcaccagatacaatgtgacacatccccggccatcctacctgctactcctccgaccccgccatcagacaaattgtgcgttttcagagcagagctccaaagcgttaagtgaattcaggcaaaggtaggatggtaacatagccttaattaagtattcacagcctctttaatacttcagtgctcttggattcgctactaaaatctgtgaattatacctcattgaaaaatgtccttaatcgactctgacatgttttattggaggcagaaaaaatgtttcagtatgatagataaggttaaaaatgttactactctgatcatttactctagtgccttgcaaaagaactccaaagccaaaaaccatttacatcattcatcggatgcaatggagaaaaaaagccttatctgacagcccattttagctgatgggacaaagtgcacattttcaattttctgacaaagttatgttgtttatgtagataagggtaaaaacaactgtaacatttctacagcatgccatgagggctggaaatgtggcttcaaatgtgaagtatctccaagccacacggagcgccacgcaaccaacaaaaagccactctttgggcatcagacgaaaacagtgcatggagcaccctccatctcaggagcagctgagaggagcagcagagggttttcaaacagccccagagctctgctgagatgtgtcacctgacaaccctataagtaccaaaagtttcatcccagctttagccccattaatttgcagtgggaaacgcagaaaccatcaattgagagaccttctacaggggtgtccaatcttttggcttcctgggccacactggaagaagaaaaattgtcttgggccatacataaaatacactaacactaatgatagctgatgagctaaaaaataaaaattaaaaaaatcacaaaacaatctcataatgttttaagaaactttacagatttatgctgggccgcatgtggccatgtggcctacaggcctcgagctggacaagcttgctctagatgttggttgttcattggaaacactgagtcttgctgttttctctgtactctgaataatatggctaaccctggaggtagagattcacactccaaggcctccacatgcccttctgtggaaggggctcaggcagttgaacctgggtataccctgggcagtgacccacacatcctgttacatcttcctcaagaggccattcacatgccacctcctcgcagaccacacatgctcccctatgcagactcatcactgtctcattaaggtggtagaggccctcggcatagcatggaggctatcaggccaggtcctaacctagacagccaggaacaaatctttggtccaaagctagatggctacatgatcttgggcaggtgacttaatatccctgtgtcactgggtcctgatccataagagggagaggatggcaagggctgaagtgcagatctgccaaggcagcacccatgatgccctcctcccaggggttggcacatgggtggtgttcaggtaatgtcagtttcaactcttgctactgagggcagattcgacctcgcataccggctgctccaaaacatgtcactaacgctccactggtattttctaaaagtcagtctttcttaggccagttatagacaggattgttttccaagtagcctcctgccctttgggattgaaattcattataaacctggcagacactcacctgctcagtccatgctggggaaaagaatcttagcagaagtttcctaattaaagctaccagagtcagataaagccaggaaaatggttacaggttaaacgatgggattaaacagtgaagagtgccagagcggaggaagaactacaaagaaactgcaatgatgcttcttccaatgtgttgtccaggatgtccagtgaatgtcctccacctctgagccatatggccaaagttacgtggctgagtagggctcatggacgtgtttcatctgacaggtacagagtacacgtgtttttttaaatgttcctttcattgttgttacagagccttccttgaccactgtgcccaaccttaacaagccagcatttctctatgtgtgtgtgtgtgtgtgtgtgtcagagtttctctcttgttgcccaggctggagtgcagtcgcatgatctcagctcactgcaacctccacctcccgggttcaagcgattcttctgcctcagcctcccgagtagctgggactacaggtgcccgctaccacacctggctaattttttgtatttttagtagagacggggtttcaccatgttggccaggctggtctcgaactcctgacctcaggtgatctgcccaccttggcctcccaaagtgctgtgattacaggcatgagccactgcgcccagcacaagggagcatttctatagaatttaagtggcatcttctagagttgtgaggcactgcctggtattaacaccatttataaactagtaaccaacatctaaaattaggaaatgcaacaggaaaacacactgtcttatgaaaacaaaaatcccaggatttttgtaggcctacctcctacttctatgagaagtgggaaggacattctaactacctggccggtacacatggatattatgaaagtcatgggaaccatgaggaactcctcagactggatcctgggacagaaaaggggcatgagtgggaaaacgggtgaaatctggagttcagtaataataataatagaacaatgttgtttcttagttttgacaaatgtaccctgggaatagaagtttctaatgttaggggaactcagtgagaggtacattggaacattctgtattctctttgcaacttctctgtaaatctaaaattacttcaaaataaaacatttatttttttaagaaagtgagaagttctaaaccgaaaggaatgtgtgcttttgagacatgcttcacgtcactcaacgcttttggtgcctggagcctggaggcatttgaatttaggacttctctctctccccgtgaaagattatctgcaaacaccccaagtgatattatatccatattttcttccatggggatctctgaccatcatgatcaagccgactcccttgccttgatttggggtctatgtgatgggagggaaaaaggttcaagtcagggaacgtcctgttttctggggctactatttcccacacccaccactgagcagaaggaaggacattgagcactacacctgatcagtggagtgtctttgaccctctgacagctcttgcatcgaccacagctgcttgcagggctgttctcagtggcagtccccatagccaccaggctgcacagccccagctgagcaaggctcttctacctgcacctgcctgggagcagagctgctaggacccctggagaaaggcagggggcaggcagctggtggagggcagagagagatgttgttgatggttttccaattctcatctggaggtcttgttaaaacctcacccccagagtctctcactcagttggttcggggtgaaacccaggaatttgcatttcttacactttccaagtgatgctgagccactgtcctggggtggcacttgcagaaccactgctgtacacaattgaatccttgcctaatgtatggatatcttgttcttattgtttccagggaatgcctcagtacagcaaaagctgtcaaggcatgctgaggtctccacgaagggagtggtttggcctgttccaatgggtagtagtactgccttgccacacaggcagtccagtggttaaggggaccagattaggagccacccagcccctagtttgaatcctgacatcactgctcactagctgtgagacccttcatcactgtgagacccttcatcactgtgagacccttcattgctgtgagttgcgtaccctctctggggcttgttctcctcatgtgcagattgtacataataaatctgtctctgcagggtagtcagcctacatgctgagagcaccttggccggatcttcactcaggaccattcctctggactgcagattcctatgccacttcttaccaaagtaacaagcattgcacacttgaatctgtaaagcttaattcctaccactttcctcctccaaaccttcttcttccacagtctttctcatccctcagtcttccttatctcagttacaggcaattcatccatctggttgctcagctcaaaattactgagatccttccaccagccagtctaaaccctatggtctcaacacgcaatgtcctaaccatctctctacctacagagcctctcaagcttccagctccagttgcactggacaccctcacagcccttctgcagagctgggaatggccaaatcctgcaggcccactcatgtccctgcaagaatcctgatgttgggagagaaagcatgcatgttccctcctttgctgctccccaaacgaaaggccacctgcagccttatatttgcaagaaactcatgctgagcatctgagcctaggaagacacagagtcctgtcctccaacagccagctctcaggccttctcgaacctctcccttccctgccagatgtgaccttgtactctggatgcctgtggtttggctttctcctcctcacaaacatggatgctgtccttctagcagagggattgatgtgtttatgcatgtatcataccttcccctctgaggatgggggcatgccttgcccaaagcacccagccagggctgagcacagggactcaactaggaggatttttgctgactgataagtccccactggacaggtctgagggttctccccaaaccatgcactctggcagtgggctagtctgaccacctcccccgccgtgtgtgtgagacccgctggtgggcactgtacacagcatggacgtggaagacaagcctggaagtgatgactctgctggagtgagcagcaccacaacacagagcagatcgctggagggaaagatcacctggggcggcactccagggtggagtcaggtgaggggctagaatttcagcagctcttgggggaggggagggcatcatcagacacagatggtaatgggggaaagaggaagagaagggggacaggggtgggagagagagatccacataaggaaggcaggagggcaggaaagggcagtggtatgttcatggagtggatttccatcctgtgtgactgcagctcaggacaagctgggcactggggacagtgatggtggcaggagtgggagctacaagtcagaagttccctggcttcctccctaggaggacatggagttttggaggcacacagacagccccggaaggcaaaagtgttcatcaagcaacctctgactcaaggatatccctggaccacacccctgggagtgagtgcaccagggagtcacattaatcccataaaccctgttgttgtcctgtgactggcaccattcatgcatggcagttttatacattaaaaatgtctatgttttggagccaagtgaagtggctcatgcctgtaatctcagtgattcaggaggccaaggcaggaggattgcttgaggccaggagttgaagaccagcctgggcaacatagtgagacccccattgctacataaaaatgatttttaaattagccaagcataatggtgcatgcctgtagtaccagctacttggtgggaggctgaagcaggaggattgcttgagcccaggagtttgaggctgtggtgagctatgattgcaccactgcactccagcttgggcaacagagccagactctgtcctctttaaaaaaaaaaaaaaaaaaagtccatttttgaaaaggcaatcatctcaataatgcctcagtattttgatagtctcctgttttaaaatgattattactgtttaaacttacatgaagcctctgatcctaacccagtagatggtcacctctagccagagcccaaatgctcatgtttgaagctcgggtttgcccttacctgtggatgctggatgccttctgtacctcattgtcctcatctgtaaagtggggataataataataatagtgtccacctcacaggggttcacagaagttcaatgaatcaataagcataaattgctgcccatagacccgggtacatggcaaacacgcatgaatgttaaggaggaacccccagcaggagaaggccgtgggaaacaactccagaaacagtggacagaggtggggggatgtgcatgtaacggagcgcctcaggagtctccaagcaggagcaaccacatggggactgtatctcatgggggctgcatcgctggagggtcaaattaggtcacagagggcccaggggctggctctgaagctccagccatatcacacacttgagctgcaccctggggctaatggcagagctgtcgatgggaagctggtaaggcaggggaccccaggaatcagcccacgacctgccatgttggtcccagtacacctcccagctctccacagctcccccaagcagggcttcaggtttctacccacagacctggctttgatggagcctgcattttgttttgtttcagaaatactatagtaaaatgagtgtatctttctggttattaattttctgatttttttctattttgcttatttatctaaatggaagatgttatatttcccaaccagctgctatatgaagtgtgagaaacaattggaaatctagctcagagtagctgaaactgtatcagttggagttgaaacaaacatcttttccccactcaggaaagaaaatgagacaaagcaaggaagagaggaaaaaaagagagagagaacagaaagagaggaggtgggaagggagggaagaaaggggaagaggaacccagttcgattatgttttgtttattgctgcattactcaggtgattgcttacttaagtccgactgccaggctgagcttccaatcccagttctttcctgtgttcataaggctcagctagcaagcagtgttttgccccccatagcttctgtagatctggctacagttaaatggtgcagatggaagtgtgaatggagggtgagccccgagagccatttggggctaactgaggtggaagaagatggggctcagagctcggtcagggtcgggttagggtggcttgctattagtgctgagaatggaaattcctcagagtattcagagcagttggctttagcctctgcactggccactggcttgtgatcccgactcacatcaaggtacgggccaggtttgatcctcctggacagagaagaaatgaaaaagtacttcccttttgtccttaagcacctgttcccactcaccgggtcaggcaaatggtgctttagaaatatgccttatttaatgaaacttctccaccttcatctctcagatgagaagtctggggctctggtgcccagacaaagaaaaacacaaggccattcaaagaacattcttgatgacactaattcctgctctaaatactgctgtgatggtaaattttatgtgccaatttgactgggccccagggtgcccagatatttggtcaaacattattctgggtgtgtccacaggggtgtttctggatcagattcgcatttaaacaggtagactgagtaaagcagatgaccctccccgacgtgggtggggcctcatccaattcattgaaggccagaattaaaaacaaaaggctgacgtcccccaggtaagagagaatgctccctgcctgccagccttcaaactggaatatcagctctttgtggtttcacaacagcctgctggccttcagactcaacctgagatgttgattctgtaggttttggacttgtcagcctccataatcacatgagtcaattccttataagaaatctatctgtctgcccaaccatctatctatctatctatctatccatccatccatccgtctatccatccatctagctatccatctatctatatccatccatccatccatctatccatccatccatccattcatctattaatctatctatccatccatccatctatccattcatctatctatccatcgatctatttatctatttaatctatcatccacctatcatctatttattatctacttatctatatctagcattcatctcttgctatctaactatacctatcatctatctatatctaccatctatttctctacctattatctatctgtatctatcacttatctatctacccattcatctgataggttcttattctctggagaactctgactaatacaactgctgccctgaaaaatcacagcctgaaccttagtatcagtctgctgcaaacttgccagaaggattgagagaggcttagatccaggcattctcaaaacaccatcctctaaacaaagtctttcaaaccagaggactctcatccatgggaggccaggtggaggcgtggcacctggagccaggagagaggcacaggatgaagccacagggcaaaagaagtgggtcttcctacagttcactttgtgtgacataatgaagctcaaacattaacttttacataaatcagacatagatagcaataaatagaattcaaattttgcatgacttaaaaatcaatcacgagatgatagagaaacttcacaattgcagtaggctgtggactctgccttcaagatttcttttcccctgcagtgacttggactagctgtttgtttctcatttcctatccatggggaaatacctgaccatcaagggaagagccctcggccatgaggggcttgatgggttggctgtctctccgaccaccttttacatcctgagtcaaattcacatgttgggggacaaaaacctggggcatgaacttgacctccaaatttaaaagtcccctcctctgccctgtttgtgacaagtggcctgtccccacccatcccagtgctcaataaccacaactttcctccagagaggacatctcaatgaaacagatccagaaagcccatctggaccttaaggggaggcccccagggtttcctcttctcctgacttagcctttccctgtggaacccccccatgcttccaggtagcacatagagcctccttgcacctcacctgcccccagcctctgaacacaaagcagaaactcaagcttgttcatctaggcaaagggaaaggcagctcccatagttgaaccactctggtctcaaaggctaagtatttcacacctttcctgaggtttttgttaggtaggggccatgtgctctgcaggagccagcactgtgctgcatggacttggctgggacaatgaattcttccgacttcttcaggagctaggcgggatatcaatcaggaggaaagaagcaccagaggctgattcacaggcacaggtctcttcattggctggagggtggcccatggccaccacgacatgcagaggcctctttatttaaccttgcttgtttcactgcacacacacataagcacagacacatgcacacacacacacaagcatacacatgcaagcacagctctacatcactcctccaaaacttttcagggttgcccaagcccggttcactggagaattcctttctctggaactctccacttgccatatggagctatgcaaattaaagtgaccacatagctgcagtctctgttcagacctgcattcccacccccacttcctcttccctccatcaagtcttctttccttctgtggctactgctttctctcctactgtcatgacagggatggccatacagggacagagaaagaggttaagactgaatccaggagacctgggctctccttccagtgccagcactgattaggaatcacaaaccctccttgcacttgtctcctcactgcctccgtggacttgacattggttttcctgccacctatttcgctaggagatcagaagaattaatgggcactttgtcatccatgagtctaaagattattggagttaactgcattctctgtggcaagcaacacgctggctccttgccgtgttcctgcagctttctggactcagtgctgtccattggtgacactgaggcactacccctctcctccattctcccctctaacacagggactagaaacctggaaactacattttctggaacctcatggaatggaccaatgagggagacagttgcccagtatttaatggacaggagccatatcgtttttcctggggcagcaatggtagatccacaggctctgcaggatgaacttgatttacagcctgcaaagttcccagctatgtgctacaggcaactgtagtcattgctggtggcttgcagcaaagtctggagtctctgaaatccagtggcatatctgagaacttcagccagttccttgaccttcactcctccaaactttcaaatggttttggaagcattacattgtctacgtgaaatccctttctacttgagatattcacaatgagttctgggcatgtcctgtgcttgtgtatgtacatttgtgttttcctctctgatacacttagtcctgaaaaaaataccaagcatcacttgtgtatttaactcaacgtctgaaatgttggcttacatggaaatatccgataacattggcataaaacaaggtatggctgtcaattgaggactcttagctctgtgagggaatgacaaggttagtcggagaaggcctcagtattttcaatcacaagctttccgaaacatgtttcagtgctgtcccatttcacacattatattacattgtccttggaaaataaatctcttttatttttgtataaattaaattcctctgtaatcagttccaagtaactagctaaaccattggttgtcctataactttgtagtgttaaatatcactgacaaatacatttaaccctcagagagtctgaaagcttgtgttaaagggatcatttaatctgaccgtagccacaataaggggtttgagttggtttcctcgtggcctcccagatggtgctgggactgcatcaaggctggtacccagtgccctccagaatattctgttccacctgctctctggccttgaggctaaatgagccatttttctgttttcaacagacttgattttgtccccttcttttaactgatggccacagtgcttttctttaaaaacagagggggattctctctttgagatcatcaggaactagccaagctgtttgaatgcagagaaatgaggaccaaagggaaaacagcttaatgccacagagaggtatctgggcactgaagtgtgccaagcacactgtgtgaagatgctgggcacccagcagtgagcaagagcttggtttgcactggagacactggggactccaaagtggaggaggagagacaggggcaagaattgaaaagcttcctatcaggtactatgttcagtatttgggtgatgggttcaatagaaactcaaacttcagcatcatgtaatatattgtggaacaaacctgcacatggacccctgaatctaaaatacaaaataagtaaatcaataaaagtttaaaaaatcctttcacttctgccatgcaccacatcacattcacaggtctcacccacaccaaggaagggggtcaggctgggcgtgtacaccagggagcaggaatgttgggaaccacataacgcattgtcctgatggaacttccatttcaaccagggagatacactctgcatgtaactggaagggcggcaggcaggcgcagaagagcgggcactgtgggagggcatctggctccatccccatagcagtagggcctggcccagtgcagggcccccatcgcctgcctccctaaagtgcagctcagcctcttctctgctcacagaggcatctcacacatttgtgacaactggcactggcttattcatcatctcagatagcaactctctgttttctcagacacccactttaatactctgacatttctgttcagcccataacattctgtcaattgtttacgtctcgctcttgcaccaatcgccttttctgccgtgctgtcggccctcccaggccctggtacgtgctgcttagcaaaagggtgggtgtcaccctctcgccgtccacaccactggatttccaaagaagtgtgctgcatcccaagccgccaatcatctcccaaggcactcacaggatgctcctgtctcacggtagatgctgcctacagaaaggcagtttgttgggctctgttcacccacaggagcctaagcagggactcccattctgcccctctccagttcataaccaaaaggcctgttgccagaacctgcaagagggcagaattgcactcctttccatctaccccatgtctggcccatcaataggacctgctgtccatcatctggccacccatcctggctcccctccctcagtctggaccccaccctaccccattcacccctgcaggcactcagcctttatccagaccacacacggcatagtcgtcttaaaacatagtgtgcaccactgccctggggacaccctgtaaggggcttcccactgccctaaggatggaatccaaacttccctccatggtctacaaggccagcgttatctacccactgctcccctcccctccctgaccatctcaacccctcacacatgccaggtcaggccactctcctaagtgaaggaatgcaggttgtatttcaggtcctctgcctcctttccatgtcagggttggggcatgtgccattcccctcacatggactgctccctcccacccctatgggaaaaggagaaattctgtaattagtggtgttgggacaaatgaacaagcatttgggggaaaaaaacaataaaaacaatgtttggttcctacatggctcctacctgtcctgcaggctttgacttaaacattagtttctggaatagaaatatcccatattgattctttgcctcacatacttgttagaattttcaagcattggatgaatttgtctgtttaccttttcttcctgtctgcatgacaacctgcaagtctcagcaaggcaaaaactaggccttgttgctcaccattgaatccctaagcaacgcattgcctaacgtagggcacaagctcaataaacatctgtgggatgcaggaattaatgaatcaataaacactaactctgcagtatggacaatgggagcccactctatggtttaaaatgtgaaagggcaggggaaaggatcttgtcataccctatattagaaggcattctgaggcataataattaaaacaatgtggcatttctaagaaagagtgaatacaaggccaggcgcagtagctcatgcctgtaatcccagcaatttgggaggccgcggagagcagaccacctgaggtcaagagttcgagaccagcctgaccaacatggtgaaatcctgtctctacaaaaataaaaaaatttgtcatattagggtgtggtggcacacacctgtagtcccagctactcaggaggccaaggcatgagaattgcttgaacctgggaagcagaagttgcagtgagcctagactgcaccactgcactccagcctcagcaacagagtgagattccatctcaaataaataaataaatataaaagtaaaaaatagaaagtgtgaataaaaaattaatcaatggaacagaataaaaagtgaagtaagaaaacatatcactcaaacattaaaaatgttgctttccaaatcaacaggaaaataaattattcaaaagattggtatggacaactagctaacaacaagaagaaaaagtgagctacagtcttgcctcgttacaatgaaataaataactgtgaaatgactaaacatttgaatggaaaaattaaaccattgcactataatataaaatttcttttaattacagtgtaatcttggaatgaagaaatcctaagtataaaactaagggcagagccatagagaaaactttgatctcttcaacgaggtaaaaatgaaaaactcaaacttaaaaactgttgttgtggtagcaggattttcagccatggtggagagaagagatcagcaacccttctccccataaaacaagtaaaaattggacaaaactatcaaaaacaaacactaagagctctggaaattgactgtctctgtccattgggctgctataacaaagtaacacagactaagtggcttacaaacaacctaaatttatatcagttctggaggctgggaatctgggattggggtgccagcaaggtcgagttctggtaagggctcttttccagggtgtagactgccaacttctctttgtgacctcacatggcagaaagagagtcagagagctttctgggctctatatataagggctctaatcccattcatgagggctccccccctcccaaagtctccacctccaaataccatcacaatgggattagggtttgaacatataaattttggggagacacaaactttttccataacattgacccaaagcaaacaataaactggaggcatttattcatgaaaactgcaagaattttgagtaagaacagtaggatttggtgatcttcttgcctagggctgctcccttctcttccccagctaaattggcatggtattttttttaggacaagtctggctggaaaaacagcatcttcactgccaaagggagctgatctgttttggagtgaagagcaaacctgtagttggttgtgttgtctttaaaagttgcaaactcagaagaaaattaaggaggaaaacccacaaccctgctaatgtaaagttgcagtcccagttggggcaaatggggtgaatggataaccagaaatttaatgcgaatatcctggaagagctaactaagctatccacacatcttgggttttatctctacctagagagcctctagcatgtgcagggaatactcaagagggcccagaagaaagtaaaactaaatcttaaggcagatttgaaaactgcctgaacatggggtacaagctacaacccatacacaaatcaatcagcagagtgtggaagcactgagcatcttccaatgactgactgactactaatctatgcagacacaggggcaactcttaggaagtcaggctaaaaataaaaataaaaataagaatttaagaaactaaacagatgtatcaaccacacatgcttagaagacagatttcatgtattaagtccaggcaagttactttttttaatgcttaggggaaattttacaatccagagtttgcataaaatattattttaaatgtccagttttcaacaaaaaattgtaagaagtggtaaagtataaattatactcagggagaaaaaaagagaacctatataaactgatgttgagtgggcccagatgttggatttggatttagtagacagagagttcaaagcagctattagaaatacattcatgtttccatggtgtaatggtgagcactctggactctgaatccagaaatacattcaaagaattaagaacactatgtttaaataattaaagaaaaatcactgcttcacattctatcaaaaactgaactcaaaatggatgagcaacctaaatgtaagagataaaaccctaaaactcttagaagaaaacctagaagttaatcataatcttggatttggcaatggattcttagataggacaccaaaaacatgagcaatgaaagcaaaatagataaattagactttatgaaaattaaaaactttgtatcaaggaggttatcgataaagacaaaaagatgacctacagaatgggagaaaatatttgcaaagcacacatctactaagaatcaggcattcagaatacataaagaattcttataactcaacaagaaaaacataaatgcccaattaaaaattgagcaaagtacttgaataggcctttctccaaaaacatatgcaaatggctaagaagtacataaaaaacactcaacagtattagtcactagggaaatggaaatcaaaaccacaaatgaggtaaaactttatatttcatacagaaaataacatggtgaggatgtagagaaatcaaaactattccacattattggtgcaatgtaatatgatgcagacactgtggaaaacagttggtcacttcctcaaaagctaaacatgaagttatcatatgacttagcaattccacttgtacatatattccccaaagacttaaaaataggtactcaaacaaatacatttatatgcatagttatagtagcactattcacaatagcaaataggtggaaacagcgaaatgtttatcaacaaatgaatgaataaagatatcatggtatagacatacaatgaaatattatccagccatgcaaataaatgaagcattgatatacgctaccatgtagataaacctcaaaagcattatgctcagtgaaagaagccagacataaaacgtacatatcataggacatcatttatatgaaatatccagaaaaggtaaatccagacgtacagaacacaaattggtggttaccaggggccgaatgaagggagaaatagggtgtaactgcttaatgggtataaggtttctttatggagtaatgaacatgttttagaaaaatgttgttgatgtcctaaatgccactgcattgtacacttttaaatagttaattttatgcacactttaaaatagtgaatttcacctcaattttaaaaatctaaaaaataatgaaaggaaaatataataacaatgactcataccaagaaccaaaatagagaaatataaactataaaaataaactaaataaaaattatagatgaaaaatacaatgacgaaatgaaaattcactagaagagttcaacatcagatttaagacggcagaataaagaatcagtaaactgaaaaatcataaataaaacttatctaacctgaaaaatggagaaaagattaaaaaaaaacagagacatcaagtgagacaacatcaagaatgacaacacatgtaaagtgggagttctagaacttgagaagagagagaaaggtatataaattgaatattcaaaggaatagtagccaaaaacttcccaaactggatgaaaacaatttacagaaccaagaagctcaaaccaaatgtaggataaatacagtataatcagcctgctgagagctaacaaaaacaatcagaaaatcttgcaagtagcaagagtaaaacaacttattgtgtagaggggagtaacaacaataattaacagcagactctgcatcagaaacaatggagtccataaggcagtaaaataacattttcaatgtgctggggctgtggtgggtataaaactgttaaccaagaattctgtatcaaaaaaaattattcaaaaatgaagggaaagatgctcctaggtaaacattgagaaagtttgttagtagccaaccaatcttgcaagaaatgctgtaggacatttttcaggttgaaaggaaatgtcaccagatagtaacttgaatcaacaggaagaaatgaaaagtttaaaaatggtaaatatatcattaactataaaagaatgattaaatatatattctgcttttttctactcttaatttttttcagaaatataagatttcaaaaaggaattagaacactgtattttttagcttctaacacatatagctaaaatatatacgacaataacgccacaaaacagagagaagaaatggaactatactatagcaaagtggcctattttgctagaattaggtcagtactaacctgaagaaaattgtgatacctcaacagatatattttaaacctacaaagcaaaaagtatttgaaaaaagtttaaaaatacatcattagaaaaacagaggaattaaaatggtacatgaaaaatttttgtttaacacagaaaagggcaaaaaaaaggagggacaggaattaaaaaaaagtgagacatattgaaaacaaatagcaaaatggcagatgtaactatatcaataattatattaagtactgaagaactaacctctctaaacaaaaggcaaagattatctgaaggataaaaaagcaaaatccaattatattttatcaataagagacacgttgtagactcaaagacaaataaatcaaagtgaaaagacaaaaatagatataacatacaggcattaacaataagataactagagtggctacattaatatcaagcaaagttggttttgagaccagaaatttttctagagataaaaagaaatatttcatattaataaagccttaatacatcaagatggaatgagtgttgtcaatgtgcattatgaatctaataatatgtataataatatgtgtattatgaatctaataatagacttcaaaattcaataagcaaaatctggcagaattaaaagagaaatagataagtcaattattatagttgaagatttcaataagccactgtaaacaatagataaaattagtaaaaatataaatacataaattttacacatataaagatattagtaagtatataaatatataaaccactatcaaccctactgacctaactgacatgtatagaacactccaacagaagaatatagtcctctcaagtgtataaagagcattctccagaatgaataatgtctaggccatgaaaaagtcttgatgaatttaaaatgatctgaatcctttaaattatattctctgcctccaatgaaattaaattagaaattaaaaacataaagaattttgaaaatttggaaatttaaaaacatacttctaaacaaccagtggctgaaaaaaggaaattacaaaagtaattagaaaatattttgaacagaatgagaatgacaacaaaacataagaattattagtgcatcagggaagggttgcgggattgcagatgattacatagggcacaaggaaacctttggagaagacagatgtgtatattattttcagtgtaaattcttgcacatgtacgtatgtcaaaatgtattaaatattagtttgtacattttaaatatgtgcagcttattatatgacaattatgtttcaataaagttattaaaaagtgcaccttgtggtaaatttataacattaaaagctcacattagaaaagaacaaaaatctcaagactctaagcttccaccttaaaaaaaaaaaactagaaaacacaagcaaattaaacacaaatcaagtagaagaaaaaagagatattagaacagaaatcaatgaaaatgaaaataggaaaataatagagaaaataaaattaaaatttagtttttcgaaaagattagcaaaattgataaacttttagctagatgggtgagcctaaaaagaaagaatacaaaaattaccaaaattaggaatgaagaaggtgttatcactaccaaacctacaaaaattaaaaagatcataaagagagactatgattaactttaggccaacaaagttagacaactcagataaaatgaaagtcacaaatcaccaaaactgacacagaaagaaatagaaacatgaataaaactacaagtaaagaaatatatttaatagttaaaaaatcttctcacaaaacagcgcaggcccagatggctacactaatgaattctatcaatattaaggaaataatattaagcctacacaaactctttcagaaaacagaggagagggaaacatttcccaagtcgttctataaggctggtattatcctgatgtcaaagccagaaaaaggcatcacaacaaaggaaaacaaaagatcaatatttctcatgaagatagaaaaaaaaaatccttaacaaaatattaaaaaattgaacacggctacagttttttaaaaaaagattattatataacattacaagtgatatttatctcaggaacacagtttagtttcacatctaaaaatcaattaatgtaatacacaatattaataaaggaccaaaagctcacatgattttctcaattttcaaaatccacacccatttaaaataataactttctgcaaaccaggactaaaagggaacttccccaacctgataaagttggggaaacctatgaaaaacctacagctatcaacatgactgattttaaagactgtattatttccccttaagatcaggaatagggcaaggatacctggttgtaccttttccattcaccattgcagcggaggaccaagtcaatgcaataaagcaagaaaaaaaatcaaagacatacatagttgacccttgaacaacacaagcttgaactgcataagtctacttacacatgaattttcttccacatctgccacccctgagaggaacaacctctcctcttccttctcctcttctgcctactcagcgtgaagacaacaaggataaaaaccttcatgatgaatctacttccatttaatgaatagtaaatatattttctctttcttatgattttctcaataacattttattttctctagcttattttcttataagaatgcagtaaattatatatatatataaaatatgtgttaatcaactgtttatgttattggtaaggtttccagtcaacagtagggtactagtgttaagttttggggcagtcaaaagttctatgcatattttcaactatgcagagaagtcagtgcccctgattcccacattgttcaagggtcagatatatattgaaaaagaagtaaatttctattcatttctacagatcataaaaagctactggaactactgagagaattcaccaaagtcacagataacaagatcaatatgcaaaaaccaattgtacgtctatagactagcaatagacaatccaaaaaacaaaattaaggaaaaaaaattcgcattagtatcaaaacaaatacttaggaataaacaaaagatttatatatggaaactacaaaattacaactaaaaacttgtacactgaaaactataaatcattacatggaattaattacacagatgaaactcaacacattatgctaagttaaaaaactagacacaaaagaccacagattgtatgactccatttatatggactttctagaaaatgtcaacctataccgatagatagcagatcaatggttacctgggactgagtgctgagaatggaaaccaactacaagtcatgaagaaacctttgggagtgatggaaatattctaaacctggattgtggccactgttgcatgactctatacatttatacataaaactaaaactcattgaattgtacacttataatcattggatgctttggtttgtaaattatgtaaattatacctccataaaatggctaaaaaattattgtagcacttccacttttgataagggtatgatagattatttgaactgtcatttccccatgataactagaaaaactagataagatattaaaaataaaaaaaatactctaaggaaatacagaactaacaaaatacagaagaattaacactccatgatcaatgagaaatggaggcccaggaggcctagaatttggggttacctttttcacctggggatatataccaattccggttaggaagactgagaagtgcttttaatagactcaccaaaaaaaagtattgaagattgctgcccaagtttcaacaaagtatggtagagaaactggatctcaaagataaactattgtaaggcttgcttttgaaattaagaattaagtcaaaaaaataaataaaagaggatttggaagtgaagtacaagttgtggatatttaaaaaaaagaaagtacaaattaatacaataagtgggtttagcatggttgctggatataagagcaatatatttaaaatatgtatttttacataccatctacaaatataattaaaaccattacaacaaacatcaaataaaattatatatcaaaagcctagtaataagccaaacaaaaatgtggaagatctccacatccaagattaaaatatatcattgagaaaaatataaaagaatataaacagagcgatattttatgttcatgaactggaagcttgattttgtaaaatattgtattttccccaacatgatctattcaatacaatcacaatagaaattccaacagtattttttttagaagttgacaagcttattgtatcaacgttctattgccacaaaacagattatcaaaatatcattggctacagaaaacacacattccttatctcacattttctgtacgtcaagagtctaagtgtggcttagctgggtctttgctcagagtctcacaaggtggcactcaaggtgttggtcaggctccgttctcatctggagatcagcggtcctcttccaagcccaggtggttgttggtagactttaatccccttgcagttgtaggattaagacctcagttcctagagtctacacccaattccctgtcacgtggccttctccatagtcagtttacatcatagcagcttgcttcttcaaagccagtagaactgaatgataacaagactgagtttatatatatgtagtacatatgtgtgtgtgtatatatatatgtacatatatatatatatatatgcatttgctttacaggagaaaagtcacacttgagagttagaaggaaatgacaatgggacaactagatatctatcaggaaataaaattgatcctaccttacacaatactcaaaaatcaatacccagggaattttagacctgaatacaaaaggcaaattaataaagccactgaaaagtaatatacgagagtatattcatgaccttagggtagattttactacattaagactaagaatttctgttcatcaaaacattccaacagaagagtgaaaaagtgacagatcatgggaacgcacctgtgacacatgaaactaacaaaggcttttcaccaaaaccacaaagctattggaagaaagacaggtgagccagaatagacagatggcaagaagacatgaccaggaacttaggagccaggatctccaaatggcaaataaacagcccagaagtgttccacctcattagtcacctaggaaatgctggttaaagccacaatgagataccacgacccacacacctgaatggttggaatttaaaaataaaaataaaataaaataataagctaacagcatgacgttttggcaaggatgtagagcaacaggaacagtcagacactccacgtggggtgtaaattgtacaagtacttcggaaaaatgtttgtgagtgtatgccaaagctgaacttacacatactttaacacaattttagttatatatgcaaaagaaatacacatgtatgtgaaccaagagacacatacaagaatattcatggctgcattatcaattgcccccaaaactggaaattacttaaatgtccatcaacagaataatggaaaaatacattgtgctatagtcataagatggaagactgcaggaatgaactgcaagaatgataaggaacgaactacagctacaggcaacaaacacataagatcacagtgcatattcccatttatataaagttcagaaaattagtaaaactatgctatagtatttagggatgcatgctcacatggtaaactataaagcaaagcaaggaattgcataccataaaagttagcatgctcttttggtttggcatggattttgctggggacgaaagaatagtgattgtgaagtacaaggagatttcagattgctggcttggatggtagttacgtgggtgttcagaacgtgattattattgagctatatgcttttgtgcacttttctctatgtggtatatttcatgataaaatgttttaataccattaactaaaaatttattgcaacatatatgataaaaattttgtatctttaatatgtagtcagcttttccaaatcaaatgggcaaacaagtgtgagatagaaaaacagaaaatcaaaaactacaaatataagtgtccaataaacacttttaagtagccaatctcagaaatcaaagaaaggcagtttaattatacaatagaaacatacaacaataagggaatttctatgcaatagacaatgattagccatgaaaagtaatgttataaataatattgatgatatgaaatcatagtcatgatataataagtgaataatatgggttatcaaactattgaatatgtgggagacagaaccttgcttactatttttaaaaagtccatgttgtaaaactgaatataattgtgatctatttttttaaataaacctatatgtaggtatgtatttatctatatgtaaaggaaacaataggatgattttgttgtcgttgctgttactgttttgagacggagtcttgctgtgtcacccaggctgcagtgcaatggtatgatctctgctcactgcaacctctgcctcccaggctcaagcaattctcatgcctcagcctcccaagtagctgggattacaagtgcctgacaccatgcccagctaatttttgcatttttagtaaagacggggtttcaccatgttggccaggctggtctcgaactcctgacctcaaatgatccgcctgcctcagcctcccaaagtgctgggattacaggcatgagccaccgcgcctggccaggatgatgtatttcaaaatgttcagtgaccatctctgagtgctgaggttacagattattttcattttataattttctttacgcatgttctaaatttttctcagtgagcatgtattagttatgaatatggaaaaaagattgttcttttttcatgataagccaagaatcatagaatgtcatcagcacagggaagctgtggggagttgaaggtggagagagagtggatattttctcctgtcccccctcatctaccacccatttgccctaaatgtcagtaaggaagattttttttaaacagaaaatagatcaagacctaaactgtctggcagcagagagacgattctttgtccaaatcaatgctcaggcaaatggtaaacaggaaaatctctgacagagccatcattaaagccaatctggaggaaggtgaagatttccaaatacaaaatatggcagctaagagtcaataacaaagatggtgtggaggcacctcatttcagagaaataaaatctccaggtatttctttgtcttgttgcttttttgccattgaccagatttttttttattttaactctctgtaactatgaacaccaggatgtgaatgaggactgcgcttgaagccacctaaaaggtagaagaacacatctaaagcccccagcaaatgagcacacctcgcaggtgtggataatggcagctttgcacacccacctgaccctgtcttgcggggttaataaaggccatcacttaattccttcacaaagccacagtgctccgtagaggggagccttggtaattattacacccataaggtgagtcaagattacagtttatgtgcagctaataaccacctatcagcaattttctcactctctctttctcagtctctttcctgatgagctactcacctgtgtcctgggagtcactgaaaacagaagccaggagtaggagagaagagcaggagggatgggggggcctgtgagtctctcccagtatcagattcatcccagagaaggctgagccccggcaagatgatctgaaaaactacagggctccctggtgccctctgcaatagtgcataacttaaaaccataatagtaggccaggcgtggtggctcacgcctgtaatcccaacactttgggaggccaaggtgggcggatcacttgaggtcaggagttccagaccagcctggccaacatggtgaaacccatctctactaaaaacaaaaaaattagccaggcgtggtggtgcatgcctttgattccaactactcaggaggctgaggcaggagaatcggttgaacccaggaggcggaggttgcagtgagtcaagattgtaccactgctctccagcctgggcaatagagtgagaccctgtctcaaaaaaaaaaaaaaaaaaaaaaaaaaaaccctaaaatatgaatagtaaacctaaatgaagttcaagaaagtccaaaatgtcttgatttatgcccacgatggccactcagatttgttttttttttcctacggtgccctgctttgcagtgtcttaggcccactgcccattactgaccctgggatggtttgatctcccactacctctttgggataacctttaggttgtgcttttgatcaaaatgcaatgatcatgcccaaaactcatcgtaaatttcaggccaattcccaaaacatcctgggtaggggagcccaggcacccacagccatgaccttgtatccccagagtgttcccatttcaagcacactcaagcaggtgaattctcctgatggaagaattcaaaggacagaaatcaatttttttttggctgttactgttttctctttgttctacacttagaccccatactttttgttaaaaatggaaaagagttttggaccactgggctttctccagagtaaatattagactagatggttatgaagctcatttggtcagaatatatgactcttaaagaaaaaggggatcaggactcagggacagctgagccatctgcagagggagaaggttcaggacaatcacccacccagccattaatgagacatctgaccaagatcaccacatcagcagccagctctttcttacaaaagcaaaggcctgtcaatctgagacatagagaaggcccacctgcagcgtatttcatcgagtgtagacacagccctacgtcagatagttatccttttaatttgactgcagtgaagtgctcttgtggccctgacagtattctcttgtgcaccaaaggaagtgaataataattaaagagtcctttggacaatatccttctatctgaggaatcatatactcaaataatttaatttgtaaaacctcttcaccaccttactgcccggctttcattttcttttgcatatattttcaccactcaactaatgatggatagagggaattaagacatggttgattgcatctcataaaggcacttggacacatttaagatcactagcctctttttccttcccagcaccttctaatgtaatgtgttctctgaacacatgtgtaagacacacactgatattaaaagctgtattctataccacctaataaagaggatgccacatcaaaaggcagagttaacatcaaacacgcacaagaatcatttaagagattagaataaaggagctggtggaaggttgatgccactaaactaccttcactcactacctctatccacaagggcaaagttaaacagccacagaaagatggcggggccacagtgcccacagcccatccaacagcacattacactttgtcaccatgtgaccctagctatttccaaaagtatgaacaaatatgtgcaatgatgaaaagtactcagtatattttgtgtgtcctctagaaacaaaggaagaatgctcctgttggggacatgtcatctatttttttcctaagtcaagaattcaacctctgacttgagccagttcaacagaacctagagtagctatttattcacgtaaaaactagcaattctgaggcagataaaaactggtgaccacgtgcttgggtcctactgcagacttctggggactaaaccccggttctgccatgcccttgctctgtgaccctgggcaagttactgagcctctccacatcctactttcctcactgtgacatggggtctcaataatggcccctgtggccaggcacagtggctcatgcctgtaatcccaacattttgggaggccaagttcaggagttcaagaccagcctggccaacatgacaaaaccccatctctactaaaaatacaaaaattagccaggcgtggtggtgcacgcctgtaattcctactcaggaggaatgtaatgcctactcaggaggctgaggcaggagaatcgcttgaacctgggaggtgggggttgcagtgagccaagatcgcaccactgcactccagcctgggcaacagagcaaacttctgtctcaaaaaaaataaaatgaaaaataataatggtccctgcttcctaagatttcttttgtgaggactgaaggagctagttcaggcaaatcagcgtatttgcactctttaaaagtaaatgataaacagatattaactatcatcattagggcaaagaacgaattctatgtgaacttaaagtatcattttccaaactctgttccatagaacaatcaagatgttaatattaataaatgctccagagaaggaagaaaaattaacctggccttggtcgaatgtggcggtgcacacccgtagttccagcacttcgggaggccaaggcaggaggatcacttgagcccgggagttctaggctgaagtggacagtgattacaccatcacatcccagcccaggtgacagagtgagaccctgtctcaaaaaaacagaaagtttactgagtagataagtgaccagttaactgacccttaactagtcagttaaggagggatgtcatgggtccttggttgacctggtctttagttctttgtaactttaacacgttgaagagtttatgaatatctcatggctgaactccacttggaaatgatgagctaaacacaactgcaaaatttctttttataagtttttttctttctttttttttttttttttagagacagggtctcattctgtcacccagtctggagtatagtggtaaaataggttcactgcaacctcaaactcctgggctcaagcaatcctgctgccgcagcctcccaagtagctgagaatgcaggtgctcaccactgtgcctggctaattttcttatttcatttttttttagagacagagtcttgctatgttgcccaggctggtctcaaactcctggcctcaagcaaacctcctacctcagcctcccaaagcactgggattgtaggcatgagccaccaagtccagctatttctttttaaattatattggaaagcaaaaatagatgtaggaaagcatgcttcctgtctgagtgatcctggtacattctctatgagctccccaaatgaaaagtccagcacattcaagaagcttctaaggcctagacctctgtccagagatgtagcacatggccaaaacagaagcaggtcaggaagatgttcaggatgacactgatggcacctccaaattctgaaggaacagtaggaatgtgcagggttctgtttagatgaagtaacagactgaaaaaaaaaaagcttgagtacaaggaaaatatcttttaagactgctaaagaggtcaagagagaaatgaaatggtgcaaacttgacatttgttttgatctctcaaggaaagcatgattttgaaggaaatggcagccaatcataatagaaaaaaaaaaactgtggattttaactaagctctacctcctaaaccaagtggtctctggcctgttaggaactaggcggcacagcagaaagtgagcagcgagcaggcctgtgaagcttcgtctgcatttatagcctctccccatcacttgcatgactgcctgagctctgcctcctgtcagatcagcagtggaattggattctcacagaagccaaaattctattgtaaactgcacatgtgagggatctaggttgtggcttcttatgagaatctaaggcctgatgatctgtcactgtctcccatcaccccaagatgaaacaggaaaacaagctcaggactcccattgattctacattatggtgagttgtataattgcttaattacatattacaatataataatagaaataaatgaagtgcagagtaaatataatgcacttgaatcatcctgaaaccatccccgctggtccgtcgaaaaattgtctttcacaaaaaccgatcccggtgcaaaaatagttggggaccgctgtcctaaatggcatcatcgtgatcactcctgagactcgggagacctcccacaaaatcctaaatggaaatccactttggctcaatgattgaaattcattccccaaacctcagggcttcaacatcagccagattttcatgagaaaatcctagaacactgtccagattattcgacaggtgaaaggaaagcactacaactcgcaaattcattgcttcacttctctgggaagcggtttcttaccaaaaatgaccaaacctgacttgcccacttcatgaggctcggaatggtttctggccatgctgcaccctggttaacactttcagagaatgaaatcataccagtcaaagtcatccagtggaaatcaggaatattcctaaaggtagaacacagaagaagagtcagaacaaaaattcttatggcaataataacttcattttaataagtatatggataacatgactattttacagggggtgggagccagttctcattggctggttttaaaacatcagcctcttcacttccaaaaactgcactgatccctaaatgcgatacaccatgccatctccttaatttatgtaaaacagctttatttcttttttctttttaaaatattttttagaggcagggtctcattctgccacctaccctggagtatagcggtgcaataggctcactgtagcctcaaactcctgggccgtagggatccttctgccactgcctcccaagtagctgggaataccactgtgctggctattttttttattttttatttttttgtagagaaagagtcttgttatgttgcccagactggtgtcaaactcctggcctcaagtgatcctcccatctcagcctctcaaagtactgagattgcaggcatgagccactgagtccagctatttctttttaaattatattggaaaatgggccaggtgcggtggctcacgcctgtaatcccagcactttgggaggccaagacaggcagaccacctgaggtcaggagttcaagatcagtctagccaacatggcaaaatcccatctctactaaaaatagaaaaattagccagatgtggtggcttatgcctgtgatcccagctactcgggaggcagaagcaggagaatcacttgaacctgggaggcagagtttgcagtaagctgagatcaggccactgcactccagcctggcgacagagcaagaccgtgtctcaaaaaataaaaataaataaaataaattatattggaaagcaaaaatagatgtaggagagcatgctccctgtctgagtgatcctggtgcattttctatgagcgtcccaaacccaagtaagtcagagtcaaagacatacctggaatgcacttcaaagtgaagccctttatgctccatgaactaagacaattgttcaacaccaaagatttcaatgatggaaagggcaaatcctcatgagcggaaacggtgacaccccaacttctcctgctccccgagacaaagccaatatgattctaaggaggccttttctttacaaagaaatgtgccttccaaaaggaggaaccatgtcaccaattaagacatttcccaagcatttgctaacctacttacaggcatcattgctcccttgggcctggggacccctccaccttcctgaacggagtagctgaataggtaaatgggttatatcaggccaggaaatcaatgtgtatactgtgttctcagccacagatgagcatgtcgaagccattctattatagctctaggagccgtattgatccagctgtaactactcggaggtggcccgcaatccaatgagaacacatccatctgtccatccagccgcctctctcccccagtagtgcttagagagtaagtgtttgcagattggattaatttaatgtttgcttaatcaaaactgactaccctggaacttaaatgctattaattactaagagaatccagaactaattcactagcactgtgaggccggggaggaacagccgctctgcagagaaagggagtttctgtttgtctctctttccagatgttcattttgtggccttccccactcccattaccactcacccacctgctttccctcacagccttctaaaaagaaaaaaagtacttgctactttggtgtttgctctttggagcatgcatgccgcatgcatgggagtctgctggttggatacacagagcctccacctcagatgtcccggcagcatgcattgcgtcacttgcttttccagtgcgctctggtgaaatagcaccctgtctttcatctacttcttggtgcaaatggttctttcccagagccccgagagctccccaaagataggagctccccaaagacttgctaatctgtgatgccccagcaccgagcactgtgcctgttgcatactggcattagcaagtgttttctgaactgaactgggggaggagacgatggcccctgccaagggctctatgtttacaaagccctctgcggcattgacacctctccagggagtgtctcagaggcttcagttcaactgcacctgcatccaatcctccatcttccttgtccttgaaaagacagcagactgttcttagaaccaggacccaatgcctatcttgcttatgaattaaatgccatcacaagaggagtgtgaaagtgcatatctgcctccaaatctatcccatggctttgcaaaagcataaccaaggaccacaaaatgccatgcagttcagccagagggctagcaggagccagaagaggcactgctacaccctgaaacgtgtctttagccccagcaataccacaggcttttggtaaaacaactgcatctgggcatctgcagtttggccatgagcacatatcacatctcatgaacatctcactatttgtggtgagtggtgagtggttccactatccactatgtgtattgtacagaaaaactccactgctctccaaagggaattcctctgctgagcacctggcccctggggtggtcactccttaaagcagaggttcttctgcaagggcatggttctcagcccccagctaccactcgggaacttgcagctattattacaggcattgcagacttaaatccctacaaggacacagcaggcagagtaaatgaccgaagctagtgaggcatacgtccctatgcagtggagaggagcagagcaaactggggagcctgtccctctccaggaggggctgctgtgactcagcgctcactgctgttcccctgcagaacacaggctcagtatgaataaatcttcttacttctgcatgacctcaccctacagtaaaatgctggcaacgaattcaatttttaaaacattcacatgtcattcaaataaggtctatagttcagttaataatattgtaccaatgccagtttcctggttttgataatgtgctatggtcatgtaagatgttaccattgggggaaggtggggaaagaatacaggagaattcttggtgctatacttgcaactttgtgtgcatcttaaattattttaaaatggaaaattaaacacacacacacacagtgcaggccaagctacatagctcaacaagccataggttttctaagtttgttgacatcccttggtcacatcaaagtgggctagtgcctcacgggcaaaatgggagaaagacccaaaaccctgacctgacagcttccacacatggccaacctcagctgttgacctttttatggaaccagtgccctggaggtgacactgcagacttagctcactgaagtcctgcctttgccagatttctgaaatcaaatcaccactgcaccacacaacacccactaattcatatgcattttgcacaaataattcttatttgatgaatagagcaccagacttacaattcagccgtggtgtggtaaattacactggccagattaactgtacaaagaacacctctcaaaacaatgatttcacttcgagctaagggggaacaagtgccctttctttcatttctaaattacattttcaatcataaatattgaaaattacatttctgatcaccgctgtcaccttgtgagtagtggcacacgagccccacagacacacgggtttttacagaaggaaagcgagagccattagaacaccctaaccactttgagttttaaagggcctgttctcccagcccacaagattataaaacgatggcaccctttggagcttgcagaggcagggagaagcagtctcactggcacattggttgttaaacatatggaattattactctgggtgtattttaccacttattatacatgggctgttccaagtatatacaggtaggtatggtgcagccattgccccagagaggcagacaggaaaacagatcatacttctgcctggtagacctctgaaacatgtgagcttcttgctatgagcaaaataatttttttaatgtaaaatagggggtagcacgctcatcttcctctccagtaataacaaaagtcaggatcgtaaggacagctgggtgctgtggctgatgcctgtaatctcaacacttcgggaggccgaggcaagaggattgcttgaggccaggggttcaagactagcctgggaaacagaggaagactctgtctcagaaacaacaacaaaattagccagacatggtggtgtatgcctatagtcccagctatttgggaagctgaggcaggaggatcactggagcatgggagttcgaggctacagtgagctgtgatggtgtcgctgtactccatcccaggcaacagagtaagaccctgtctcaaagaaataatataataaaataagaccaaaataatcttgaaaaaatgaaataaaaatgaatgctgcatgtagaaacttggaaaaataaaataaaaaagacagtaaggatggagaggctcttcaaaggaaagatgaatggagtgttaaaattacttggctgaagaaatagcaggaaagaggcagagctgcccccgtggtcctggctgggaaaagggaagggtggaagagactctgatagaaacacaaggctagaagcagagtccgtctgaaagacttagatggtgagctagtttagctgcaggtattttgacattaagatgaaaataaagcgcttgcctacaatgaagaaaccaaacacccacctcaaccaatgaatcatatccttcaggacatatacccctggtgcctttagatataaccaacactaggttcaactcttctctggatccatatacctgtcaggcatgtggaaggaccattaatagactgtagcaatctctctacccactggctcacatcagggatgtactgaccactctgcttatgctggaccacaccaaacccaggcaacactaagccatgcaaagtcatacatagaatctcccatatcctaaagacgaagcccataatatattcttgcaactctgcattccagagtccccttcccccacatgtatagtatgcttatagtagtcccttaagcataaagttgtacagaccctaacatggtagtatttgtacatcacctccgtgccttgctctagcactcagagttctagtacaggcatcaagggtgtctgctgcaagcatgcaccagagggctaacgccccaggacagccctccactccaccagtagcagataggagttgatggattcatacccagccatttcctcccttacttggaacaactcaggatttttttacattcccagagctcccagctgccaggcaaagcaatctgctcattcaatgtgttctgtatcagtctccttcccttcccttcttctctcgggctagatgggattaaggcctaaagaccacctatgttagccagagttctccagagaaacagagtcaatgggatgtgtatacacacactgcataacaacattttggtcaacgatggaccacatctaccatggtgctcctataagataaaaatatagctgaaaattttctatcgctcagtgatgtcttagccatcatgactgtcaataacatctgatatggtttggctgtgtccccatccaaatctagaattgtagctcccataattccctgtgtcatcagagggacccagtgggaggtaattgaatcatgggggcaggtctttcccgtgctgttctcatgatggtgaataaatccatgagatctgatggttccataaaggggatgttcccctgcacatgttctctcttgcctgccactatgtaagacatttctttcaccttctcctatgattgtgaggcctcctcaatcatgtgaaactgagtccattaaacctctttttctttataaattacccagtctcggatatgtctttatcagtgcgcaaaaacgggctaatacaacatcatagcagaatgcactatgtttaaatttgtttagataacacaagtacttatcactgcattacagttgcctgtagtattcagtacagtaatatgctcacagatttgtagcctgagagaaataggctacaccgtatagtctaggcgtgtagtaggccataccatgtaggtttgtgtatgtacgctatgaggttcacacaatgacataatcacctaaggatgcatttctcagaaagtatccccatggttaagcaatgcatgattgtatatggagagccaaattcacttaaaggaattggttcacatgattttggaggctggcaagtccaaaatctgctggttaggcctgcaggctggagacccacccaaggaaggaccagtgatgctgttccagttggaaggttgtctgctgcagaattctctcttgctcaggggaggtcagtcttttgttctattcagactttcaaataactggatgcccactttatggagggcaattagctttactcaaagtctactgatataaatgttactttcatccaaaaacatccataacaattttcactaaatatttgggcaccgtggcccagccaagttgacacataaaattaaccatcatacctccattccccatcccctaccagtgtgtcctgcaaccaccactgaaagaaacaacttgcactctaattcttgtaacagtgtctgcttctgggggaacctaatttaaaacgttgtatttttagtatactgtgacttggaaaataaatgaaagcatagaaatgcttagtcctctttcaaaaacctagtgacccatgaaagcacttggcccacagtttgggaaccactgcattgcaggtgctggagtttaatgcctagaaaggcccacgcaatctctaaggccatgtaaacacagatgtttccaaagtcgttgatcatgattttggaaagacctcagcattcctaatagtgacacagatattaggatggtgctgtcaaagaagtccctctctattccattgcatgcccgaccttccagacagttagcaacgttctgagaggttaaagactcttatctgaaacccatcacgtcaccaaagcagcaacgatttcatttaaaaacaacacctctatccaaaggctcagaatctgttcacaaaagaaaacacatcttttgacatgcctaaaaatacatgattatatcctttgtggcaagatgagaccaagtgactcattgaagtcataaaggctgcaaattgcagtattgttgtctttgaatgaaaattgccagaggacttgtgtttcgttgtctcaagaaacctaggcagtcatttgccgcatcaggagatccaaatcatctgaagttgaagatcatctcctcctttttgtatttcattagccaagatcaggttaataaaaagtttaaaagttgactgccttccccaggagatttatttagacctcctctgaggggatgagctgggaatggcagcctacactctcatttctccagagctcactctgtcttctccctctgtggtccctgaagtctgccaattaaagacctcctcgatgacattctgctgctgaagttatgcacacataaatcactgtaataggagaagattgttatgttaacctccaccatgcaacccttttccttttgtgagaaatgtgaaaaacattcatttgtctggcacaaaggaagctatttcccaacagatgcctggaagccttgcctggatgatgccccttcctgtggttacgtaggtggtgcctcctgcaccagcaggcattactcaactcgaaacgcagagcaacgaggccataaaccaggcagcattacgtcagagacagggtgctctgaaataaatggggagctggttctatctagaggaacatttttccatgtttaaccaagcaaaactggagacattactgaacacacagtctcaaaggtcaattcttaaggagaccagtgctggggagggaagacacagtttctacagctatggaggaacccttgaggtggctggagtttcactgttagaacgaggggctggtgtgcagcgactgtgaattctactttgatgcgaaagattgcatcttctggttgagcccctgggagtggcaaccatagcagccatggggctgaacctggaggtggtcaccactgtgtgcttcctcacctgcactgcaaatcttcatgggttcaaattccccagagattcagttttcaaaagagagacagacagagagagagagagagagagagagaatgttttatcaacaacagaatacatattcatgacgcattaatgacttatatctacatgttaactttagaagataatattaattgaaagacttgaaaaggaaaagtctgggcatgagctgagctgtttctctctatattcagttgcccccagttagctgactcaaggctggggtgcccccaggggatggcgaggggggacctgctatgcagatacagcccctcatccagaaactggcttgctttggacaccaaagtggggacaccaaacttgatcaaaggactcatttgcccacccctaaagacctgattttcagagctgctatcaaagggcagccaccttgcagggcaagcccacagcgaaagaaaggaagaaagaaggaaagaaggaaagaaagaaagaaagaaagaaagaaagaaagaaagaaagaaagaaagaaagaaagaaagaaagaaagaaagaaagaaagaaagaaagaaagaaagaaagaaagaaagaaagagagagagaaagaaagaaagaaagaaagaaagaaagagaaagagagaaagaaagaaaagaaagagagaaagaaagaaagaaagaaagaaagaaagaaggaaagaaagaaaaagaaagagaagaaagaaagagagagaaagaaggagagaaggagagaaggggagaagggaaggaagggaaggaagggaagggagggaaggaagggaaggaagaaagagaaatgacagtggctcacgcctataattcaagcaccttgggaggctgaggtagaaggattacttgagcccaggagttccagaccagcctgagcaacatagtgagtccctctctctacaaaacaaacaaaaaaattagccgggtatagtagtgcacacctgtggtcccaggtatttgagaagctgaggggggaggatcacttgagcccaggatttggaggctgcaatgagctatagtcacgacactgcactccagcctgggagacagagcaagaccctgtctcttaaaaaaataatctagttagaggggttggtagggagggaacaggacacaatttctcttattacttatttcacaatcaaaatgaaatttcattctagttcacactacagcaattcacttgctgttggaattttgacatattctgtaaagagtgtccaaaaataaccagttgtacctgattctgttgaactctctgcacctgtccattttaaatctcattttcttatttgctgttttttctcccccttcaaacttacaggtgtaaggtgctttgtttttctgcttttctttttttttttttttttttttttgagacagggtctcactctatcacccaacctggagtgcatggcatgatctcagctcactgtaacctccacctcctgggttcaagtgatccttttgcctcagcctcccaagtacctgaaattacaggtgtgcaccgccatgcccagctaatttttgtatttttagtggagatggggttttatcatgttggccaggctggtctcgaactcctgatctcaggtgatctgcccacctcggcctcccaaagtgctgggattacatgcataagccaccatgcctggccagatgcttttctccttaacctagagtgaccagccatcctggttttcctgggactgaggactttcccaggacagggggctttcagtgcttaaaccagtcccttgcaagccatagagttatttgccttctttaagtaaacatgtaaatcttagtttgagcctaccaaaccatgatcaattaaacacagtatattagtcctttctcacactgctataaagatactacctgagactgggtgacataaacaaaagagttgactgaaagttctgcatggctggagagacctcaggaaacttacaatgatggtggaaggcgaaagggaagcttgcacgtcttacaaggcagcaggaagagagaaagaatgagaatgaggaagtgccacactttaaaaccaccagctctcatgagaactcactcagtatcatgagaatagcatgggagaaaccacccccatgatccaatcacctcccaccaggtccctccctccacatgtggggattataatttgagatgagatttgggtggggacaaagaactaaaccatatcacacagtttcacggttttgcagtagcagatatacaagtacattcaccaggctgtgggaaactggccctatgggtttctgagcagaagtgagaccacgtccatcattgctgagaacgatttccacttcatactgcaggaagaagactgaaggttttcagaggctattgcacaattcaaagcataaaacaataaggggttaagtgaggggaatggaaaacaaggggcagggtaagcagacccttctccacggaggtcttgcaaattgttccaatccagtcatttatacagtcttcaccagttacccgcaggccccatcaaaagcaacatttcacctgaggagccaacatggggtgccacctcctccctggcacatgtggccagagcatcatctcactgtggtccttttattttgaagtaaaatatataggaacaattaaaaaggatggaaccaatgcatctcgacattctctttacaggcaaaaagaaaaaaaaaaaaaccaaattaggcttttgttaccctgacagcactgagaatcatctggcttgtgagcttttaaatactcagcgtataatgaacatctccagccagatccagtgggcatcactcgtggagactggccacagggtacgcccacatctcccttgccttcttctaggctttcaaagggagcctgtgatgcctacatatgaattgcactgaattgctcttgattaaatcactgtaatttttttgttactctatgctttacattaatattagttgaatacccaagggttttttttttccactaatcccaggtccaaattacacttttctcatccagaagtgttgggaagatggaaaataaaaataacgagtatgaggaagaagaagagaaatcgctgatactgagaggttttgctaagcacctggcattttgctgagtgcttctcatgttacgttgtgctctgtgaaactgccattttcatgggtcccatttttatactgtttgacccactacattgtctcctatcatcctcacagcaagtgaaccaatactgtcatcgccctctttttacacgtgggtacactgaggctggagaagagtgtggtccaagcatgtggttgagtccagctgtcccagctctgactccagagactgtgctgctagctgatacccttgagtgccctgccctgacccagttccccagtcttttttcttttcccttcttccccaacctctactctgagctgtaggctgctgatgagagaggacaaacaaataagatggacaagatggtaccaaatccagagtcatgtggacaaggggacggcgtggattgagtggctggggcagttgtaacttcatgctgctgggattggaagccagagcttattgaaggcaagtgcacgtggacattcccagcagaggaggggcagagctcccagggaaccacaaaagcacccacgtggaggggctgaggatgtggcctgggaaggatgccatgtgaccacgtttcctctctgttttccaggccaccgtggctgaccacccaagcatccgagtcaataagtctttcactgagaaagacctgatgccccgcacaatctcgccccaactgggagggttggcacaggctttgtcttctccttgcacttactaaagtttatttaacagtttggaccttgcctgttgaatcttgaaaatatcacaactatgcatatactgtgttctgaagagcttacccgaacactatttattagtcactttgatctaattcatcacatgcaaaaatctcaaacaagcactaagtgtcctttcaaggggacgtgttaacgtagttaaagtatgcctaagcctctgtttcccacggctcgggcaacgggtgccatgggttcaaaaatgcaattaaaagaagactgtcaacttcatcattgtcaaaacgccacatcacccgctaaaaaagaggcgcccccttcgtcaatttccccatccatgccaaagttttggagagacccttcactttataaatcaactcacagcttagaacatcctggcagccccttcaaggaaccgatcggaatgacagggaaagagaggataaccatcatagcttgactggatacaggtgtttgcgtttacagacgaaccacaaacgcctggatctttgacaggcgttgatgctatcagtgaatcgcagctattattggctccggtcaccaagggctcgggggcctttcccttagcaacatctctgaggctgataacatttggctgaacttttcagattttaacctcccttctgactttctgcagtcaaacccgcctaaactgatcagaagaagagacacgcagtgggaagacaagtaaaatattattgactggactgtttcatgtctattaggaagaaagagcagaggggggagggagaacctcacggtctgacaggcgtcaagataatcaggggaggaatcggggctgctcagtaaccctcagtgaggttggaaagcactggcttacaagaggtcattgttctgcgcggggaacaaacagggcgccaggcaaacaagggcgcaattgcattcctctacgggaccccgttccttgtcagcaggccctgctcctgcagcaaagcataggatgggaaacaaaaacaggaagtcgcgtggctcaaggaagaggcaggggctccgcatcctcatccaacggctttggtttctggaagcagcaggatgtgctgaccctatatgcaccctggtgcgtggggcctttgtgctgggcagaggtgggacccagagggacaggcgatgctgctctggaaggatttggctttggcaattggtattttcttgtgtgtgtgtgtgtgtgtgtgtgtgtgtgtgtgatttatttttaaattttagattcaggggatgcctgtgcctgtttattacacgagtatattgcatactggtgagaattgggcttctagtgtatccattacccgaacagtgaacattatccctgatgggaaatttttcaacaactgcctcactcgcactctactcccttttgaaatccccagtgtctattatctccattttatgtccgtgtgttcccactgattagctcccacttataagtgagaacacacggtgtttagttctctgttcctgcattaattcacataggataatggcctccagcagcatccatgttgctgcaaaaggcataacttcattcttttatatggctgtgtaatattccatggtgtgtatgtaccacattttctttatccagtcaactgttgatgggcactaaggctgcttccacaactttgttattgtgaatagtgctgtaatgaatatattatataataatatatgtagtgctgtaatgaatgcaagtatacattataatgattaatatatacttgatgaataatataatgatttctttcctttgggtagatatccagtagtgagattgcaggttaaatggtagttctgttatttctttgagaaatctccatactgttttccgtagaggtggaactaatttacattcccaacaacaatatataagcattcccttttgttcacatccatgccaacatctgttagtttttgactttttagtgatagccgttctgactggtgttggatgatatctcattgaggcaactggtattttcaatttgcatttcacttccctgctccttgttctgctgttcctgacggacctccttgcttcttcaagttcacgtcctcagcctcctggctgtgcatgcccaggctcaggtgtgcatgttggggagcagctagaagggctccgcttcctctcagtgaccttaagtccagttgccaagacctcctgggactccacaaatgggttgatgatacaagacatgcttccccctgcccccaaacctactggagaggacaacaaaccccacttgctaaccagtttgcaagaccgagcttgccatctgaagcagaggtcaaggtattcagcactgataaagaaagctggaacagtgaggccatgccctgccctgcctctcctttcctccctggaccactttcatttttactcgccccttggttctgtcaggtaaaaccaaccacagacactgctcaaggaggtcccagaaaacctatggaacattccccaccatcctttgggtacaattcgccttggagccatctctctttgaggactgggcttatttcccccaaacatgtttccactctgtattccagcagccctgatctgtgcaaatggtttgctcacggccatccaagaagcaccatccttttgttaggggaagcacctgatgcccatagaaccgtgtgacttgtccacttgagcttctcaccactcagggtgagagggtggggtggcatttcagaaaaacatcaggaaagggagacttggaatcagagaatggcagtacagaaaggaactaaaacatcaccttctccaattatttatgccacatgtggggaaactgaggcacagggcaaagaagaaagaaacccttgggtttacacatggtaaactcccctgcggcccgtccctgcctcaccgcatggcccggctttgcagtgcattcaggcatgcgggtccatccatgctccagacacgcccagggtaggccccacctgcaggggcactcgctgtctccctcacagctgaccaggctctaccgcagaccttcagctgggcctagatcagaaacctggagccaaacaagctcccatctccgtaacacatgcagttggggggcctgcaatgcttcctccccacacccggcccctaaacttactcttatttccatctcttactgtggtcttgcgtgtcctctttcctaattcttcccctgttaatcaccctcccactccctgccacagagccttctagaaccctggttctatgacattatgatgatgatgacaacgatgacgatagtggcaatcatttattaagcattgccctggcctaagacaccacatgggtcatttcttccaggctccaacttgcttctgctttgccatatggtaacacgccgtattatggaagcaccatcattaccgccatttgcaggggaagcctaaagaggtgaagtatctcgctcaatctcatgcaagaaagccaggattcgagcctgcgagctcttccacttcagccaccctcgcccagcattgtcccagaatagtgtcgtcaccacagggtggagggacgggtctcagaactctaacatccccatgtccgcccctcgaccacagccgcctttcctgccagtcttcagacacctggttttcttcccagagacctgcagaacagtgatgccagccccttgccccttgcatcagtccctcctggcagctcctccctcccatgcagcccagaacccacactggttcataagaacacactggtctcagctgggcactcagttatcccacatctcttccttgtccttaaacctacagagattgcgccctgctcacccctcctcctcccacccatgtggctgggagctaatggtaagaatctcgccactgtgtagcactgcatgtgggcccccatctccactgcaccctaggtccctccatcagggctttctgcctctgttttcagcttcctctttcattcctcccagtgctcttgtgacctcatccttccacctacaaatttagcaacattcatggcgacgccttcctgccagtctcaccagccactgaagaccaaccttccctccttgctctttcctgttgcccatggtcctctgtctcctccactctgttctccccaccaccaacagctaaagcactcctaccataaaccaacaaactaaccacccttaacatgatgacctcctccctctcactcagtccagtcatcagtgaccttcccataggcagatctcagacacccactcctcagtccttgtgtggctgaacatctctgctgtgttcatcaccactgaacactcctgccatcttgaaactatctacccccttggcctcgggttttcttccttcctccatgaccactccagctcatttccacccatggctccctcgttcttgacctgtccctggttggtggtggtccccaggcttccactgacaacctgccccgttttcctctgccatagctttacctgccaccccaggtgctaactcaagctcttcccaaagattttggcttagctccaaactggctggatatctccagttgccttcggcaaaagaatatgttcatgacaagggcccactctcttgctccccaaggtgatttgatagtgtggtttcggattacagcctggcttcctggggtgatccatcacaagaataaagagtactgataaggccaatgggtgcacttccatgtcaggatggttgtgtttctctcggcaaatgaatgggtagtttccccagcacctgcaggtggtgagagttggtctcagctctgataacacaggctctgccaaaggtgtgcccttgggctttgggggatggaacggagtcagtgatagtgtgtggtggtgtccatctgtccttgctcaaagccgatctccacctgcacctgttctgaaccctagctctggatgaagagagcagttgagtgttgatgaatggacagagccagcccccagctcttctgggctcactgtttgtgggggacttatgggcatgcttgagccatagggtggttgcaccccggcccacagggcaggatccccatccacattcacctcactagaaatgaggcagcccttactgtgtgaaatgtcacagcgtgggggagtggcggtaggcagccactgggaagaagcaccctcctcaagcgggtttgatgtttctttaactctcaaaactgctgcccatggtttacaaggtcatgaacaggaaatgacacacagcacatgcctctcatggcagcacctcctggatactccatctggacctgaaaatgcagaaggaacagggggaggaagtctaaccgggaagccgcctttcagatgcccactctgtcactcactcactgcgtgaccttgggacagtgaccagctcttccgaagctcaggatgcttatctattggacatttactacaatcccaccctgacttctcaccaggttgactcaaggttctcctgtggttaccctcagagctgtcatgagtgagcccagaggatgacggagccagtaggggtagtgtcttcacaatcctcaccctggcagtcccgatgtggtcccctctgctgatcccccatccatgacaggctccttctcatccaacaggctttagcccaggagtcaccgcctcagagtggacttcccaccactcattccagtgcagccgccaactcaaggcactttctaaatgatgcctctgttctgttttttgaagaaagtctcaaacttaccttccagggaaactgaccaaaccaagaaatgctgaccctaagtccctcctggagccaagatcagtgaattcctacatggatcagatgacgtggcctcttctttgagcttctctccaatgctaatcttctagttatcaccaactagaggttttttaatttatgtattacatttcttgcttgttatctggtggtctgcaaggtataggtgtatcttagccactgaagtagaacctgactggctcatagtaggtcctcaataaatattgactgaatagctaatgaggggatgattgagtggacatcccctgtccgaggctcggatacctggacttgatagaccctggttcccaggtctcagtgggttctgcctcttgtcgcctcctttgccagccacttcctcaatgatggagagagccgaggttcccctgctggatgcattttccgtgaatttggggaacacaagacactgtcaagcccacagtgagctctgagccctttcaggagagccaacccttgatacagtcccccaggtacccctgtgagtttttctcctataaaaaatgagaaatctgtagctgggtgcaatggctcatgtctgtaatcccagcattttgggaggctgaggtgggtggatcacttaaggccacgagctcaagaccagcctacccaacatggcaaaaccccatctctactaaaaatacaaaaatttaccagatatgatggcacatgcctataatcccagctactcaggaggctgaggcataagaattgcttgaacccaggaagcagaggttgcagtgagctgagatcgcaccactgcagccactacactccagcctaggtgacagagtgaaactttgtctcagaaaagagaggatcttccattgtaaacatgaccagaccttacccaagaaagaaattccttttgatgcctttttaagcagtgtactcaactaccaaacagagctgggacttccgtccttcccaagccactcctgtagagcagagacaggcacctgtctcttcataagcccttctttctctatagtctgatttgatttgacctgtgcgataactcctatctgtgtctggtatcatcactcgtgtctccgaacatttcacagcagtgactgatgcccagacctccggctagatggtagccctgactgtctgttatctgtgcacctggtcagcctctctccacttggactccagcctcttgagggactaagcttgcaacacctcacatcaaatagaccaacgagccaccttgtttggctgaaatatatgttcattctacaatttggccatcaggggaaggtaagaaagaagagaggcagaaaaacagacgaaatgaaagggaaaagacacacacccagcagcagagaaaagacataggaaaaagaaaaaaaaaaccagtttaagggagaggggaaaatgaatcatatacagaagcaaaagaagattaaggggagaaattctctaagatctgctgtctataaaggagtgacggacatgaggtgaggattatacggtgctgtccacttggcacaaagggtgcaaagtcctaacatccccctgccacctgcatttcccactacaccatgctatgaatgagtctccattccagctcaaacatccctgcaagctcaaaagtagaaaacttgtcctcagatgcaacaactgttgtcagagcaatgttaccctgagttgtgaagaaacctaggtctgcatggaagaaacctgggctgccccagtccctggccaaaggtttgccaagcaccctcagaagacctgcaattgtcaggggaagtgaacttggtcccccgtcccccaaatccctgcccgttctcattgcttcatagtccagtgcagtccccgacccagacccaggcctcccgagaagccggtgaggtgaagtcattggagggagcctcatccctgatgggtgggcacagggcctgtctgacttgcccactcatatcactcagaaatctgaggaggtggtgcttgaggggcagtagaatgaggctccaagaagtcactctcatctctgtgggccacgccagagttcaagactggatcttcgctccaatggccgagggatctctggaaggtcccctttgccaccaaaagcctgcccttttctgcatgttttgaaaggagttttcctaaacacagcctcctccatcaggaagtttgaatgtataaacagtgactcttattcagaaaagcagcgacgagcagttttatgtaaaagttacatctccatttaagaaagaatatataattccacattccactgtccctcgaactttattcccatttatgtagatcttaatacagttatatagtcgcggggctaatgtcccctccggatggtaatgaggtcctctcgaacccgttagctgctataaagtatgcagaagttaaacgcacagatggaaaaaaatttgtctcaattttatacttctgcaaaatggtaattttgtacttaaaatgtacaagatggatgttcagaaatataggctgatagcctaaattatatttggtcataatttatgtagtacagtcccaaagagatacaaaaaggcagagcataatttatctgctggaatcagcgatagctttgctaaaactcccatttattccatcccccatagttttaagcagccttcgtcctcagggctcactctatttaagttttccatactgctgtttgatcacatattgtactctataatttgcctatcatctgaagcaaatttaggtcccagaagttatgatctctacatagcaaccactttatttggtaaatgcaaaatatttatagcaatataaaaaccagatgaaaataaaattcctataatcattggaacatacacactttatcattggggcttgtaagaccattagagtaagactagtatgttgactaatacaattacctttggacgctcactcgaatttgctgatgcttgggaactggagaaactttttctccagcatcccttccatcttgccaatggtgaaaaaacaaaacaaaacaaaacatctgggcacgggctccagagagaattgccccagaggaaatgagttgaaaagcgaaagtcagataagtcatcactgtgcctcagatgtggaaaggaatttccaagtaaaaacacactgcttggcaatggcactgccctggatgggttcacctcttaccttccagggaaactgaccaaaccaaggaatgctgaccctaagtccctcctggagccgagatcagtgaattcctacacgaatcggatgacacggcctcttctttgagcctctctccaatgctagtcttctcacacctctaacttctttgtgtgtgtttgtgtgtctgtgcttccaaaattgttacttggagatgttcaggctggaacctacaacatgacacagtccatcaacgctcctcgcaaagcaacgagctcttcaaaacagagtggagagagaaaacagggaagggacaggccccaaactgaaatgtgcacatgaaaacctgagggaataacgttactatgcatattcacatacacttgttgagtgtctgttctctgcaagcactgtctaggacagaatgctattaggacagaatgctgttcaaataagtgttcaggtgactttcgcttatgcataggaccctgccctaggttctttctagtcctcagaaaaaccctgcacagtagggcttacagattaccagtattagaaggaggaaattggccaagggtggtggctcacacctgtaatcccaacactttgggaagccaaggcaggcggatcacctgaggtcaggagtttgagaccagcctggccaacatggtgaaaccctgtctctactaaaaatacaaaaattaaccaggcgtggtggcaagtgcctgtaatcccagctactggggaggttgaggcaggagaatagcttgaacctgggaggctgaggttgcagtgagcccagatcacaccactgcactccagtctgggtgacagagggagacttcttctcaaaaaaaaaaaaaaaaaaaaaaaaaaaaaaacaaggaggaaactgacggagggagaggtcacccagtcaagtaagtggtagaggagagagtgacacctaggactgacaccattcaagccagctgtatctgataccaaacaagccccctgttgtacttttctgtatgccaacacagaacaccaagcttcccgaagtgcctatgcagggatattgcttctctgtcttcagacctctccccgcccacctcaacccccttccatccgccctcaaggttgccttcagctgagtgaagatgaaataaaaccccagctgcatctctctgataaaaacttcaactgaagcctcatatattttgtagatactaaagatctcatggctctttgaagacgagtgttgtattaatcattgtggttgttcagattatttcctcatttttaacattgctcgagccctctaccacagagccaccatttctgtgtccagggtagtgaggccctaagagataccctagattcctctttatagccacttcctccttcattgcaacttagctccagctccagctccctaagtctaagggaatctccccatttttaacttttttacccaaaacatgcttaagcagaaatcaactgaatgcatatttgaatagcattctgttctaatccaaatattattctacaaggtccattttaaagtctgttttttcatatatcacactggagggagagagagaaagaatatagctcaaaataaatgtgtaaaaaaaaacgaaagagatcataagggcagaggaaataacttggtctaatttatctcctgattctataattatttcaaaaccaaatacaggttcctaaagtatcagtgtggaaaggagccctaatgcaccagaactgctcattccacaactggggaaactgaggctcataagagaagtcttacatacaccagtaaggagaacagctaggtctctatttgggtcttgctcggtagcatgtgaacaatgtgtctgttctcaaaaggcagtaactattgcaatcagttgggaactcaagaatatctgacatatgggaccatccatgacttgtctccagtcctcttatagcctgtgggcagggagatgggtttcatttgcctattgtctgttcatcagcactcctccccatgcaagggtagaggaagcaagagggtatgttgacttttatcaagagcctgcaggctgggcatttagtttgagctttctccctctaccttcaggcaatcctatgcatggctccaacgtgcaggtgaggctcagtcaagggcagtcattttcccaaggacacacacaaccaagcccaataattgataatactactgtacaggttacttcagagaaaggaactattaatgttgccttggggagtaggaaacaacattctagttgaatcttctaggacgggatggtatttgcatgcagaggacaatttgtgggcagaggtgctaaggtcccagtaaatatttaggatggtgtttgcacacagaggacaatttgtgcacagagctcctaagacccctgtaaatatttgctccatgttcacagtccaaggagggagaaaacgtgcaaaggccctgaagagagaggctttaaaaacccacaggaagctctttccaagtgttgcaaagggaatggttgttcatccttttcttaggaatcgttcaacctagccctgcctcccagccaccctgcagccaggagctctgatgtgtgatattatatagagttcaggaatgtgaaaggcaccacataaaatcaaattctcttctattttaagttgagtggtgcatcagttcagctttaaaacctgatttcttaaaagtttcaaagggaaaaaaaatgttcctttgcaattggaatcgagtccacataaattagcaggccagctctacatatccatctttccgaactttcctggattgttcattttaatcaagcggcccacattcttgacttttcatccttcactgcccagaatgatgcactgcagctactgatgacacgcaaatgttaattttgttcaagttcaaacatcatccaaaaagggcctattttaaagactgctttgcaaacaccagctgaaaatgaggatgaaccgaatcaaacaccgccaagaaattcagaggagggaaagctgtggtcttaaggaaactcacaagtttttttttctctagatcctcaacctctccaaggccgagagtagaatccttgatgtctagagctggaagggaaatcagatttcaccccagccctgcccaaggtcattcagtgtggtagggaagggacgagataattcaactcttcccctgggtaaaagagccttcctaaaatgtgaaaccagtgaaaccatgtatttcaagtctttctgtcatttagtaggtttcaggagcagcaggatacatcacacacacacacacacaggcacaggcacacaacaggtttattttagaactctggctcaccccttaaccaactaccacttcctctatcccgtcttcttcagtataggatgtcactattgcccagtgagggcacaagagtgacagttgttcagagatgcttcaacaggaatcgtgcacttgaataaggagaaatcagccaagttcctatttcttcatggctgaaattgtctgagatttggcatctgcttttttgcctttgcacccaatgaagctgcatgagaaaaggacatcatctgtatgagtcactaccgcatccccctggagcctaaaacagggccttggtgcctcgtgagcacccaatgaatatttctgaacaaatgaagaaatgaaatcactctggtctattatttaccaggatccttcaaagcaggacagtactatggaaggtctcagcatagaggttagagatctgagggtccctaagtcgttgagcgccatctcacagcaacatggccctagagaataaatccatctgaaagctttggccccagggatctcaacggccttgcctctagaataccagcctcatgtaaacaagccatcggcagtgacaagtaccagtttccatggcccatcagactaaactgttcacagtggcggcccatcttctgaaagaacagaaaagacactgcaacgtcaagaaaaaaatgactgccgctattccctgagcgataacagccgctcttgaaatgcaggacatgtttcatttggcttataataattgtgtactgtcttttaaccctcaaagtgttaagcattgtcatatcctctggggatgaaaagatctggggttaacaactttctcttttaaaaattcataaaggtgcaaataaacagcattgcatccagtggctatgcattgcaagaagccaagggagaaagaggaaaaaaaaagaccacaacaacaacattaccccccacaggatacttggcaattaactgcagctatgtcagcaattttttgaaaaatttcctaaacatggagaagactcatcctcaccatatgaaaaacaaagctactgcagtgactctcccatgcattacaatgtgtgtgtcttacttcttaaccaagccgctaatcacgcaaattattgcaactaattacatttgaaggtctaattaattctttcagtaccacatcatttagtacgcattcacaacacagcacctgttttgaaaatccttgcagttaatttgtttataaacaaacactatttgcataaaatgtttaatgaatggtttaacagttagtacaatactccagttttgtcttcgtagatctgaggtcatcaaaggccacgataaattaattttaaactatacaaattaatttaaatagaatgtgtgaatttctcattaataaagaaaacattttcaacatgttaattaatatctctgtaacaggctaattgcttcctgcacaacaagtacatcttacaagcaaaccttaaagatttggggggcaaaggggtggggactattttaaaactgcaaaacaaaaagtgcaattcagaaaaaacacacacagcccgattatactggagaattcaccacttaggacaggcaaaccaagaaaggaagctgttgccttatgttacaaatacaacacattttagtcatcgagaacgggacggttgaaaaacatttctatcacaggtgcagttacgctgcaaagatggttagatgatgtctgccttctggtagaaagacagaattaatgaaaatattagttctgagagtgaagatctctcctttgaatgtagggcatattagctgtgtttgtaacccaatggtaaatacggatttcattaaacaaatctgcatcttcacaccagtgtctgaggctcagccatcataattctccctgtggcaaaccatggaaagatacttcacgtagaaactaaagaggaacaacattatagcccaacatcaagcacagcccttgcaaaagccgtcactgagatatgttcgcccttaagtttgtttccgatttgcaagcgttttcacatttgataagcacctgttgtaaatttacatccacgcaggaagtattcttatgctagggagctgagaattgtaaagcatgtttatactcttacccttttgtggtgttgccccttaatgcacaggctgataaaatgactagctacacaggacccagagggatgtgccgctccacctggttcccgccgcatcttcccccgaggagccactagtcccttcctcctggaacaggttctgtcagcactgatcaacaagcacttggtttttgttttaagtttgttaatttggagaggacatggagagacagggagcgagggagagagagagagagtgtgtatgttcagggtgtgggggtagaacgacagaaagacaaagagaagcacaaatacagacttcccaacacttttctgggacctgccaatgtatttccaagaaaacaatggaaaaacagtaggagttccatcctgatagcaccaggggaaaagaagaatttgcccaacctctgattggacccagatttccagggtggtgctgctactcgtcagaaaacacttggccacatggccccttggtcctgatatttctttggaggtgtatatagaataagactatcccaagcaccctgctcccaaactaccctggtgaacccagtatggtgtgaaaacccctttgctttgctcttttgccagataaatgccagccagcatccctgtctctggggccctggagaggccttcaacacacctggcctcactgccctgtggcttcaacaaagaggccgagcatctcctataaaccttgaggtccatggatgacatagcggaatgatggatttcagaaaaggcaggtgcttcccactctttaaatttttgtttattctttccaagtttcccatcaacagccctgcagtaaaaattcagggcttcagagacaaatatttcatgagtacagactgtgatgaggaaaagcaagccattccctctctatcaggatccagaggtaagctgctgctttgctcttaaaacgcaagaaaaaaaaagtgattaacggttggcacaggactcaggattatacgccatttccatgttgacttctttttggaaaagatactcaggatagccatgtgaggagttactccgggtttcggccccatagccagctagaactgaggttcaaggggcagagggtgaactccccagcagagacagaacggggcaggaggggggcaggaggagggcaggaggcgggtggctgtcagacaaaatgcttccatcccagaacaagcagaaacaggcgcaccactctgcaatataaaagtcagaaagccttgcaacctagatgcaacccagggacttcccccttgcagccagcagccaaggcagcttctaggcactgtgtggctgtatttaaacccaacttggtccctaacttctctccaaagccggtcaagttgccccaccctaagcatccagatgacaggctcctgcctcccctcttgcacaaaatcattcccggatgtagagcctggctttttctctttacccattaaaaatcaccagcgttttgcaaataaaggcgatcaccatgtgaaaaattatcttttaaaatggagtttaatttgcatataaggaacgagagatttatgacaagcaacatcgtccagtactgcatctgcctagtatcagtcgtaatttagattgtttgtgactgatcttaaattctaaagcttggagaagatgaagtactctgttgctgtattattgtcaggagtctaagacttaccagagatttattagtaatcttatcacaaacatgtctcaagtttttgcttttaatatgtgccaagctcctctgaggaattttcctcactgcaattatattcctcaatgcctgcattctgaagctgagttgatttccttcccaaaataaagcgacctatcattacaccacagccgctcttgtacatttttcctctgctacttaataatcaatgtattcatcattaaaatctgagccctgaagcaatggtttttagcatattctaatgactagcgacttgcaaattacaatgacctttcatgtacattctgtaagcaccttgttctaatgtgtactgtatttatagtttgccaatacaaactagccaaagattggataattactgtaatctattagctcgattgctttccctgctcatttatagcatgtgccacgcaggccattttcaaaaactggcctatctttcatctcccgcaagctcagaaagtaagggatacttcatcttcacaatatacacacttacaaatgtctgaagaacagcccgtctcagctcaaggaggtttcaaaaataaagaaccttctttcctattagtgtcataatgctatttgtgactgacaaaaaacaccgctccgagaatgtaaactttcattgaagaatgtcaaggccagtcccattttctgcccattactctgacctccaaatagcatttaataagatctgctttgaaagaaaaagataaaggcacttcccttaaacaagaaacaattttttttgttataagtaaatgtttcaagtgaaatattaaactttttcttttcttctttttcttttttttttttttttttaagcacactgctgttacgactccagaaccgataaggaagctatgtgtggaagtatgagctcaggtcgccttctgaccctctgtgacggtctatttcaggcagttatggatagataacattacagacactggtaattaaaacaacactaattttgtctctgtggtcacgctttgttgttagaagccatctatcatggccttcacgcatcacgcaatgagaagacatttgtctacgtacattgtgcttggtcaacggttttacggatttccccgcgtacctggacacccaggcacttttaaagacgtactgccttcatttctactctattactctgattaataaaacattttgcatgcttcatcaaaacaccctgcaagcttttcaccacatatattcatggggggggaagcaatgttaatttctttcccttttagaaagaaactaacaacaacaacaacaaaagaaattctcttttggattggaagagagaaagaaaaattcaaatatggaaatatttgtcttccctgtaaaacagagtccagcctaatgaaaagcataatattaaaacacacacacaatgccaagcatctcctttaaggctacacgtatttttgactatatgtatcgttagttcttttctgtgcattcatttgcttgatttatggacactcaatttcacttcaccttttattacaagatctacagttacattaagagtaatagcaagtcaaatgtttttatatttgggcaattaaaaaaaaagaaaagatctattccttgggcccttataagaaattagggatagctgaaatgcaagatgactagtttagttctgttgtaatcaactaagaagaaactgtaatggtgcatttcaagggatctttaacaagtgacacaaacaagagaagaagcagacaggaccatttaacttcaaactccaccgaagagagctgaattgtaagcttcctacagcaagcccggctggcggctatgtggcagtcttcatttctcagcggaaaagccactcccttgagactctccaggcaccccccaaccgcattttttatcaagtgtctaaaaggtaggagctgttagaattcttttctctattcacagatgatcacagcccttttttcccctttagcttgcagacgcacatgtagtttcaaatattagctagaactccagccctcaccagcccctaattgctctctcagggaaggtatcataaactcaggtatggctgacacagatgtagcttcaactttatgcaggcaggaatgctacatcaaagctatttgcaaagtgacatagctagttgtttaaaagaacatttttattatattccttggaatttgcattcttctagaaaccaagtgtattttttaacacggcctcagaaatgttggggcaattgaccattcatgatgtctgcaaaggaaaagcatctaaatatttttcaagcgactttaataaatttgagtgcgtctgtcactacatgtaacctgattatttaaataagttaatattatcacttctcttttgccagctgctgtaagcagtcggctgctgtcattaagcaaaaaggccaagacaatgtgagtttatctggtcctacctgcatttctactcatcgttggactgaaacaaatgggaaagaaaaacttactgacttttggcgaactacaaaggttaactctattcatcatggagaaactgatactaagtgctttctgtctgtccatatattctaaagatttagaaggaacctggtagtgttcctgggagacagaagacagagtgttcatctttgccatatgcagagtgtctcttgcagttttctctttacctcactggcactgctgaaatccttcttagactacagagttttggaaacaagtttatttttcaatgagttaaaaagccaaagcttttctttcttaggatctttaactcttttaaggtaagtggcagggtttgaagctgctgttaaccgtttgaggagaaggagctcaatagcttgcagtgataggaagagaattctcatcacccaggttgcaataaaacgtgcctctcccgataccagtaaagcccactccggagatttccagagactgttggaaggcagtggaaggtaaacccagaggaaacacaagataaaggcaaccaggtggcctggttcttaaatcttaaagcaacagttccaaagttgagagcccgcattgcactctattgcacagcctgacaggagaagggacgaggaagttcagaacctggcaattggagtgtttcccagcgccgggtcccaccgcgcaccgcaccgaacaagaaatctttttcactttctataactcatttgcatgaatttacttttttgccttaagaggttgttgtaatgtgtgttaaaacacacagtgcaattttatctccataatatcacaaaagaaatattatgttagtataaagttaaaaaaaaatgctgcgagatcctgcagcacggcgagcggcaaagcgttgctcaaaagcgccacccaaaggcgggaggagtgtaacggcattcagggaggatcgtttttgttaatttcagcaatccgaatgtaaaaaatgacagcgccacgcaagttgacggaggcttttgattgaattgactgattgcctcagctgcacctgcggaaaattgatgacaatgctgtctaaaccattcattaggatttgaaacttcacgcagatgaatgctggattcataaatttgctagacatgtgttgtagataatatgacaaagcactgttttcaaatgaacatttctttgacctaattttatcaaaatcatgcaaaggaatgaaagaacatttgtacccgaactctttggaacagctgcaactgaggtctctctctccatctctccctctctctttctctctctctctctttaccttttttgtctttcaaataaatttaaatgaactatattgtttgaaatatatattctagtttatttaaattatttttagaatggcaaaacatttatttttacttattatgaacaatgttactctccgccagatgaaggaaaattattttgagggtttttttcaagctccaaatttgctaaattgaacacaagtggtaagtagatttttcaaataatattaataacgcgatctccacagacatgttggggggaaccgtttcagtaccaactggacatgcattctgtgagaagtggacttcttgcaggctttgaagggaaaagaaattcctgtaaaatattgacgcttttggtcaaaaatggcgaaaccagaaaaaaatgacatctgtgtatattgtatataagatttctgacttgttctcgattttaatgtatcaaaacactatcaatatttaatggagctttctctgtgtgtccaagaaagaaaaacaagatgtctgagaaggggaagggagcaccgttttcatacctggcttggcttagctgcacgagagaagaaaaggccgtggctgaatccatctccaggagcagctgtccccctgcaccgtttgaattgcgaggaaagagttacagttttagaaaagaatacctggtatttaagaattcgaatttctcgctgcagaactagatctcacttctacaacaaggaccctctgcttagtacttggactcccccccaaaaaaacaaaatgaatatttattaacgttagaagaacctggcgcaggtcggtccgtgcatccgaatctgccaaaacgcttccaaatctcttccctggcatttaaaagaaatctatttttatacattctcatgaatttgggttttactaccagtaaggtaatttctgattaggcatcttgggtttttctctctcttttttttttcttttttcctaaagaatccctgcaaatacacccgaggtgcttgagttaaccccacacctggatggagagaaactacaggtgtgaacggcaaggctaatagacttgagttttgccacgcatttattcttctttttttttttttttaccattctagcagttactttaaactggaaaacattattccaacaatccaaacaaggctctttaaggctgctatgcccaagctgctacagatacaaaattatcaagtagacatgtgaaaccccctaaatgcggaacaatctgggttggcttctaattgctatgtttcaatttctaatggggaaaatgtgtaaaacaaataactgggtattgggagctctgagcactaaaagcagaacattcttgtatttcagtaaatcatataactctacagatgggtttggaaagcctgaagctccagccaccttttagactatttggatccagcgtttgcttcgaattccgggcaatacgcttaaaacaaattacctgtttgtcttggatggcctttgcaatgagaaccctaggcctgcaagacctctgagattcattgacctcaccagcccacccacaaagaaagatacgtggatactccctgtattgcccagtcctggctacaatggcagggaggagcaggcaaacagcctccccgtcaaagatgttacaatctggtcaatgtacactggggtaggacacgtggggagtcaaatatacatcaatttctggcaacacacggcaagaaaacacagatgcccaaaaggacatcaactcaaggttaattcttagctctcacagaacgggggaacttgggcatagttaagcagcaaaagctttgggggaggaggtagcagagaatgtgtagggcagagatgtgtatatatgtgagcctccaaggatgcactaactgtgcctgttctttctcccttggttactacccttcctgctcttctggtagggttcagccaggcacagacaagagtgggcaaaggagcacccagccttgctgtgctcacccacgcatatatcctgcctggcctgggcagtcacctgagtttgtagcccttggagatgcacttgtcaccctctattctgacacctttataggaacaagcctttagtctcaacaatgagaaaaaaaataaaatgcccttcctccaagagcttcaactaagaatcatttcattcatcctaggcattctggtaatgtcctttttccagttccttgttctaagaaatgctgcattgtaggcatatttaaggaatctacccttctcccaccctaacctcctaagccagaggggctttttgttcccttatcctgtgtatcccctcaaaactcactcaaaatcttcttgtgtggtcagaatggggatccttttgagcttgttatgagacaggctctgtcctcactggggtctcaaatgctaaattaatttttatgtctctttagacacaatgaacaaaaaccagagcttttgaatacagatttccagtaaaaccaaacccagcttgggtcagatgcacctttccagcaaccaccatctcagcaacaacctgccagctgtcaactggaagttcagcttctgggaacttcagcccccttctcagaggagcaaggtcctagcaccaacagcacctgcagtggagcccaagtatggctgcttcatggagaaggcaggtaaagaggggtgtgcacactgtctcagggtggcaactcttattgataacgaaggcattgtggccttctgacgggtactgctgcccactgacaggtacgtgacagtacctccagctcaggtcagggttaggtctcagagacccttaagaaaatggtattccaggccaggcgtggtggctcacgcctgtaatcccagcactttgggaggctgagggggcagattacttgaggtcaggagttagagaccagcctggccaacatggcaaaaccccgtctctactaaaaatacaaaaattagccgggcatggtggtgggcgcctgtagtcccagctactcaggtggctgaggcgggagaatcacttgaacccaggaggtggaggttgcagtgagccaagatcatgccactgtactccagcctgggtgacagagttagattccatctcaaaaaacaaaaagtggtgttccaatcaaacaatagataattaacactgtgttccagggtcagatctggcagttgtgttggacagacaacacaggtagaggagagagaaaagaaaggaagaggttcaggccaggcatggtgcctcatgcctgtaatcccagcgctttgggaggccgaggtgggaggatggcttgaggccaagagttcaagaccagcctgggcaatatagtgagaacctgtctctccaaaaaatgaaaatagcacggcgtggtgatgcacgtctgtagtcccagctacttgggaggctgaggcaggaggattgcttgagcccaggaggttgaggctgcagggagatttgattgtgtgccactgtactccaacctggatgacagagggagaccctgtagaaagaaagaaaaaaggaaagggagcgggagagaggagagaaagagagagagagggaggaaagaaaaggaaaggaaaggaaaggaagggaagggaagggaagggagaaagaagaaagaagaagagaaagagagaaagagaaagagaggaaagaaggaaggaagaaaagaaggaaggagggagggagggatggagggagggacggaagggagagagggagggaaggaaggaaggaaggggggagggagggagggcacggtggctcacacctgtaatcccagcattttgggaggccgaggcaggcagatcacgaggtcaagagatcaagaccatcctagccaacatggtgaaaccccgtcgctactaaaaatacaaaaaattagctgggcatggtggtgggtgcctgtagtcccagctacttgggaggttgaatcgcttgagcccaggaggttgaggctgcaggagactcgtttgaacccaggaggcggaggttacagtgagccgcgatcatgccactgcactccagactggcgacagagcgaggctctgtctcaaagagagacagagagagaagaaatgaaaagaaaaaaaaaaagaaaaggaaagaaagaggttcaacaggcagagtatccttaaaaaactcacccagcccctccttcatttagataagaaaatggctgagaagtggcagagtcaaagttccgatgcaggcccatgggccctcttggttcacctcctccagcccaggcttctaaaactacttcccatacctgctgtattgcagcaaccatgctaatttagcaacttcccatcccagatgcataaagaagatggaaccaattcaccatgaatctatccacccaggcatttagacacaaaggtgaaaataacaacaggccctgtcctcgagaaactcctcgtccaacaggggaagggggagagtgccagtaaacagggccgttgagctctgtcccagcagtggggacaggcttgcatagaaccaccctcactcctgcagcaacttccctcatgccagacaagaatagagtgaaaggagacccccaccttagctttcttggcctggggctccatcctgctgtgcctagcaagaacacaacacacagacacacaccaatagatacatgtatcttaccactactgggggagaaagaaaagaaaaaataaatcactgggaaccgcagcagggtgagaacccagacctcagcaagtcccaatttcagaggtgacagcatctttaaatgccgcaggagtgcgctcctagctgaggcaggtgtgtggattcaacagttgaccccagctgtcgcagagcgcgaggaagctgcgcagtaaaccccttacatatcaacctctgaggaccggtttttctgcacctggtggtccttctagacgtctaggaggatcgtgttctcaggagagggttcttcagcatctgtgctgaagaacactgccccagcgggtcacatgcaagattccaccttcgagcaacatagctgacactctgcagcccagttgtcacttgtaacaaaccccagtgggtcacatagtgaggggaggcaaggctgcgtaaggcagtggctgaactatcccagaaaacaaggatcacaggcccccagtgacaccaatgttgcagaaacacctgcagtggcaagtcagatgtcctccaggaccaggcagataacaaggagtaggggtctgcagaggcctcgggagggtctgcaccatccaaagaaatcaattgttctgcacagtggtaaggatccagtgttcccagcacttccaaacatttgaatgaagccagaattccagataattatgtgaaatccccaattactaaatattggcaacaaattcatatttctttcaaataatctgtgaaccaagcaaaatacatctgtgggtagattgggatcccagatatgcactgtgtgaccgaccctagtaaaagccctccctccaaggaccctggacactcacacaaaccatttaattcctctccttcctcccaagccaagcatcacagcattcaacaggtaggactagcaagctcaggccaaggtcacagtgtcctgagcagggtgggctaggggaccttttgcacgatgttttcctttgggctgtgggaccacgtcatctggccagagagcaaaggctttcctagtagaagttaccctctgagcttgtgacatcgagggccctgcctctgggcagatcccccaagcatccgtgcagggctgcctgagaagctggaccagctctgacacagccagtgggatgttccacagcctcccagggcagaagggcttgtgggagattcgcttaaacgtgaccgatttcctctcgctggttatctgtggaaggtggaagaattaccccctggtcattagggaatcaccctttcacagcagcagagcgtgtgtgacctggatgatttaaattttagtttttgtcagcatgtgctttcatcagattgttctttttatatatttcatacatattatatatttataaatagatactaaatagacatagatatagatatatttaggtatgtgcatttatttttatattgtatttttttatctcatagttccttgctaatgcatatagactgagtccaatacgatagttaaaatgtcacattcctccaaatggatttccagatattgaaatgtgatcactgaggctcagtgggaatccctttgctctcaaactccccgatgcaatgccttctgatttcaacagaaaagcaagaggctccaggcaccccattcagggactgccaccaaagtacccgcaaatccttcatgaaaggggagacattgacacattctttttttattctctggtaggtatctgtttgcgtgcaaatccgtgagtgcttgcatctcgtgtatttgaaaatcctgtttaagaatgcagaggtccatatagtgtcattaaaacaaatgagtataaccctttggtcatctaggtgaaagcattttgttgggttttttttttttcaaattgctattgctatatataaatgtaacgtatagcaataaccgtagaaagatactgtgcccttgtgtatggataattaaaataggaacatctctggactaaattaaaatgtgtaaaaaccaaatccttatagcatccatgaaattacagaagctacaagtgaatcactagcccagggacgaagcatttctctcattacttcatgaacctcttccatgatcacagttttacattttcacaaatctacatggttctttttatgtcactaaatatctcagctcacttttactgccctccttatagacatgcgagttggtaacagcacgcaaacagtctccaatcatttaagagaaaccaacactttcagtgcttttgatgacacttattactacaaattatgaactaaaaaactgagcaggatataaggagataaattacatctttagaacataaagggggaaaaatgcatatttttcagtaccagaaaatcaaaacccatgggtcctaatctatgaattaagaagacctgaatacctgagaacgtgtacacagatttttgccctaacccatgacctgcttaactgtgtaactcccctcaacagaaagatcctgatttgcccttttctcctctgtactttgaacataagaggtgttattacccataactttttatttaaaggaattgtgcagctgggaaaatgaatgaatttaattatcaatgcagtgtgaaaaaaatcattagagcaagggcctggaacgccacatattaaaaataaacaaaggctattaaaaaacagttccaaaaaggaacgtcagtttttcttcaattcttaaaatgtaaataccaaaaagaaaaccatatgtaaacatctatagttacagaagaaattactctttaagaaaatgttaaatgactgactggatcatttaactttaaatctatactttatgtggcagtataggaaggtcatttgattgccatgcatagaaaaatgagaattctaatgtgttctcaaagtttcaccttcataagacaaaattttcattatgaaattgtatttaatggtgagcacatagaacttcttcctcaattgcatgggatgacacttctgtcagaggcgtgtgaaccagagcaactccatcttgaatgggggctgggtaaaatgatgctgagacccactgggctgcattcccagactgttaaggcattctaagtcacaggatgagataggaggctgacacaagacatgggtcgtaaagaccttgctgataaaaacagattgtagtaaagaagactgctaaaacccaccaaaaccaagatggccatgacagtgacctctggtcatcctgactgctactctcccaccagcgccatgacagtttacaaatgccgtggtaatgtcaggaagttaccctctatggtctaaaaagggaatatatgaataatccacacgttgtttagcatatcatcaagaaataaccataaaaatgggcaaccagcagtgcttggggatgctctgtctatggagtagcaattcttttattcctttactttcttaataaacttgctttcactttactcgacggactggccccgaattctttcttgcgcgagatccaagaaccctctcttggagtctggatggggaccccttttctgtaacatctttccggcgaccgcagaagggactacagtgaggaaatccccaacccaaaggttaactttgggtaagtgttaggatcctgtaacacttccataaccaaaggaagcttgtctttacctttctaaaagacagtggaattatatcttttaactaaatttttaaaaacaactctagattaatattccctccatgactggagagtaaaagcactgatttagctgagtattagggaaaaatactaagcacaggtgcccaggaaagtccttcctagtggacgaagactatggagaaacatgtgttctaggcatacaggaatgctgaactgcttatttgtggttctgaattttctgcttgggaccaaatttgacctgtagctgcagacttcccatggggtatttacagctgggccacttacaaattggaatccaggggagtccaggaaagatgaatggcagctcagttatttccagctgaaagtgaatggggcatctgaaattgaatggggccctggatcctgtaaacatatgagatcttagcctctgatagccaagtttggaaaatcaatgaaagcaatagactttctcctctgcccaatgcacacacaaaataataataataataataatgcaatgttgcttacactttcaagaggtttatggaccacctcaaagctcatgcatgcacccattcccccagccccaagagaagagacaggatgacagatccaaccggaacagagtgtggccccatggtggtctatctccagctaaacagagcaggagcaaatcccacaggagcaaactaagggaagacaaaataattccacctgggaggagaagagcagggggtcttttcttccatcagctcaaggaagactactttctgaccatagccacaagagttagacactgaagagagaaagagcatgtgggagatgcccagtgccgcagaaacgagacgctttctggacagtgagtccagtctccaccaagagggaggagagcccaggagctgccacatgtcctcagctatagcctctccctctggtgtaccagagcctcatgttggtgctggaaaagagaggtgcaggctgaaacccacatcaaacaattgtcactaaccaatatcacgcagttgtttttactttcaccaaaagctttggtgtatgtgtggttcctgatttacttatttccacgtctctcctctcccctgggtttcccagtgcctctctggaaggtcagtttctaagacagagtccagctggttcttcccagcctctctgggactgaatccctgcctggatctgccttcagggatcgccatcagaatggcacacagcacttgccagtcccctctctgagccttagtggccccatctctaaaaccagaacattgaacaaaagcatctgaaggtgaatggggccctggctcctgtaaatatatgagagcttagcctctgatggccaagagccttttggaaattcaatgaaagtgatggactttctcctcaccacaaaaagataataatgcaatgttgcttacaatgtcaattacatgggccacgccaaagctcatgcatgcgctccaagctaagagcccctgacctggctcaaaacgaccatcctcaccaccataagtttcaatatgagggaaactgagccccagagaagaggatagagtgtcccaaagccacacagaaggaaaatgaccaaactggaaagataacccatttcctacctcccaggcaacatccttttcctgggctcttctgccctctgcactccttcattctcatcaatgcctttctgattaccccaggtgttgccacctttttggctccccaggtaggaatttgatatctgggccccacaggtcacccccactccagagttcacctcccagcaatggcagggacttggggaaggaatgatgaaggtgaaacatgggagccagaagggggactatggccaaaataccacagccatcaggtaagcactggatgaccctggctgagaaaggggacaatggagacagaaaggagccacctgtcccttccacgcagaataggtggccctaagctgttgtttcaaaaagcacatttgctgtcttcaaaaaaatatatatgtggaggaggaggaggaggaagaggaaaaaaaaaagatgctcaggctagataaattcagaatgatttgaatacattactgtagttaagtttagtacataaagtactgaggatggctctgccgtgcatttcaatgaagcccaaaataatgaggcactagctgggctgttgcggcttcgtcagagcgattctgccctaataagtgggaaggaggtggctacggctccctgcctatgaattgtcctcatgggatttggcccggcctctgaggggaaggcaaatggaagatgagagaagctgggcagttgggatgagagactgaacacctggagagaagggtgagcccacgtggagcatttccaggcttgaaccagccaaggagtccttcaaggcaaaacaaaatctgtccccttagaccttccaggtcttcccaagggaggctgtggggggacgtggagtccaaataccagaagggcagcctccaacctgcttctcacagctctcttgtctccacctcctcagaccctacactcccaccagagaaaatggaaagacgtaacttagaaacctagaggcccagagagcaccagtgattccctccatgatccatcacagggaggaggttaaggagaggaggaagggaagagtgagaagagaaggaaatgagggagggagaaagagcaagggaagagatgaaggaagaaagagacaaaacaaagtcccccatctgtagctgcctcagcccctgaatggagagagatgctatatgtggctttctccagcatttccggggcctgaaatggctaatctgtaagagctagaggaggagagactgactccataaccactacatgagtcatgtgttccaaacagcctaggagccaacatccaggttgtggggacagacgaatgcagctgtggctcagaaaaagaacactagaaaacatgatggccctctgggaggaccctttgtagagcctggtctttgactccataatcaggcatttgacactcagacgctggagcagaaagagccatgaaggcagcagacctgatccctaggcagtgacaaaagagggtttcctttcccatcagtctccagccagagaagctgggagttctctcaggtgagcccagcagatgttacgagcttgcaaataaagggtgaaagtgactagcctccgtctaaagggaaacccaagcctatggccagcctctcactgagaaaatataaatagttaaatccgtaaaatcagcctccttttctgttctctggatataacttgctcctggacgtctgtgagtagttagctgaaaagctgttggggtggacatctgttgtttttgcctgcccagccgcttttctccttttactggaaatagcatcccgattttccttgaggaatcactcctcccccatgctcgatccatgtggtcttgggtggcgctgaacccacccccagctccagggacaggcaagtgacccagaccaggacaatgagggcatcatatcccacgggccaccatgattggctcacgggttgggataggaactaatatggaacagcctgactcaataacaggtctttgtgtaaaaagagaatcttttcactgaagttccagagaagatagatgaatgtctggtgctgctgacagccatcttgccaccacaaagaaagactccaagctgcttgaaaatggagttaaggcagagaacaccagagcagaagcctgctgacagcattcttgcccctggatccagctatacctgaagatctaccccctgggatttttagttacaggagccaagttcatctgtggtttgacaagcccatctgacgtgggcttcttgcaaaagccttaactaagataaactcacctatagagtctttttttttttttgagacctttggagcctctataactgagtctattttagtcaaggcttatggaatctaccataagttcacagatggactgataaacatataaggtgtctttgtccatttgtgctgctgtaatgatacctgagactgggtaattcataaaaaacagaaatttattttctcaccattctggaggttggaaagtccaagttcaagtgccagcaggttcagttttctggtgaagatgctgtctgtctccaagatggtgccttgctgctgcatcctctggagggaggaaccatgtcctcatgtggcagaaggtagaagggtgagccagttgaacactgcataaagcctttttcataaaggccttaatcgtactcacaagaaaggagtagctgggctcagtggctcatgcctgtaatctcagcactttcagagtccaaggagggaggatcgcttgagcccaggagtttgagaccagcctgagcaatatagcaagaccccatctctacaaagaattcaaaaattagcctgttatagtgataggcacctgtagtcccagctacttcggaggctggggtaggaggatcacttgagcctaggagtttgaggctacagtgagctatgatcacaccattgcactccagccagggcaacagagaaagactctgtttctggaaacaaaagagagagagagagttgccctcatggcctaatcacctcttaaatgctccacctgttagtaatatcacattggccaaaacacctgaattttacaggagacacattcaaaccatagcataatggatcctctgaagtcacagggctgatgggaggcagaagagcctcctctcccggtaccatgatgcctagcaggttcccggggtctccaaaaaaaggtatgcactggcccagttgcacttcgggctgcacagtgagtgaaggactccttccccaggaatatatcaagctgtgaagtattcacagtttttaaattactcatcaagagctggatttttttttctcctctgctaccttagttactgattatttccagacccatcagatacacaaactcttgtttttaaaatgcaatcagcacacccacgcacccatctatagatagtaaagaataggtgctgaagtccctggaatgtattgctatcatgcaagatgaaatggacagcattacaaatgtacactcagcaggaaaatacgatttacctggtaattcaagctggggatggataatcagttcatttcaaataatgaaccaagaaagcactgccatttggaaaacttgggggtccatgcttgtctgtgggatcttggtgtggctgtgtcattcttatgcagaagggtcaccacctcttccagaggacacaggacaccgtctccagtgggtcagatgcagctgatgggagaccacccaggcagactccccaggcaccattttctcatctggctccagtggttttagagcccacagagaggtctgtcatttcttcaaaggctgactctgtggaggggcagatggtgcacagttctgtccctgatctcgggacaggtttaaaagtcccatttgttgatttcctctcttgtcctctgtgcattcagtcccatcactgagctgcttatggctgggagctacaagatctttgtagtgggggatccttcgaatttatcctgacatggctccagaaaatgctcaggtgggttatggacaatgcactcttaagactccggaccagctactagagtgtagaccagggcagcagcaatacaggaaaacatctcaggaaaataaattcacacagaacccattatagctgattttgacctattttgaagaaaattgcaccgtttctaggtgtggagttgatctgttgcaggtggcctacactgtgacctctcttgtaggcatggagatgaacatacttggtatcatccactctcctgcactgctggctcagtcaccagccttttcaggcacggggtctgcaacctctctcatggtttgtgccatctcttgagtcaggagccacagacctcatccaggacttacagcctgacagattaaggagtccgataaatccacacattctgagttgttatgctgggcaaaagccatgcccatccacaagccagactcttggcctccactggaagctttggaactttattcccatcaaacactgacctaatccttgcactgagactgctatttacattaaaattggtcacataatgaaaaaaaaaggtagttcattaatatgctaagaagtgctaatttgaacattgctgaaaagcaattgcaaattccattttgcaacttgcaaatgtgatgcagtgcaaattagggctgatggacccatcttcagacattcaaacttcatctgggtatttctgagttccccaagccttggcggccgagattggttgcaagaccagtgggggtgatttctccttcattggagatgaaagaacgtgcttccagtagtgggtggacaaccatgagcccttctacacagatatcaggtgagtccaaggaagcctgtctcaaggggcttgctgaaatgacccgaaacagaagaataagaatgaccccaaatgcacacaacacatgtcttcagagagcttgagctgtgccagatggacaccctgcacccagtgaagcccccagcccccagcctcaactccatcttccgctgggcggccttcgatgctctgttgacccaagctgggttgagaggtagcctgaggccccctccttcagcaggagaagccagtgggaatcagagccagctttggcaagggtttgccattttcctcccagaggtgctctaggggcagctctctccatggaaaataaagccccagggactgtgccaggctcagttgccccttccatcttcctgctatcctcctcctgtctacaaaggcagtggagttagaacttacatgactgagcttccaaagtcagaagacacccagaaattgatgtgagatgaaaaatacacttgaaagtcccttaggacagtgtagcaccagagaccaacataccttccccttggtaagtggacgctgtcaactttacctccatctttgtctgtcattccttctttcattggattctagatgaagtgggtggcctgcctttggcaccatgctgtttcctttatttttttttaagtgtgtacctttaaacatataacagcccattacacacagcaagatgttccagctctaagagacaccagccacagtccctggtatccattgccaaggtctgccagccacagagccagcacaggcaacagctccccctgggtcttcacaccactctaagctaccttcccagaagtggaagaccagcacttctgctgggatctaactccaaggcagaagtgtctcactcatgaataaatcctcaggtgcaacttccttccttcctttccttccttccttccttccccctttctttccctccttcttttccttccttcactctttccttccttcctcccctccttccttctttcctcctatttttccttccttccttccctcctttctttcttctgcccttctcttccttccttctttccttccttccacccttctcttccttccttccttcatctcctccttccttccttatgtccttccttccttcctcctcttccttcgttccttccctccttccttccttcttccctctctcccttccttcccttcttacttccttttttccttccatcttttcttccttccacccttctcttccttccttcatcccctccttcctaccttctgcccttctctcccttctttccttccttccttctttcttccttccttccttctttccttccttccttccttttcttcctcctcagctacttctcaaaagggcacaaaagggtgaagtaaagagatggaggaacccggctaatgtaaggagaggcaagtccaccctggagccataaacaaggtgcaaacatagtcacatggacatgcagtgcccacggggacactgaaaacgtggccctgagctttccatggagctaaagccaaaaggaaaacaaaacccagtaaggagcaccttgtcagcaaaactgaaaaggcagcgatcctgcttttcctgcagctgaggcctgagagaaatttcttagctgggtcccctccaaggtaatggacaatgtcctcaccatagattctatgaggcagctcgctggcccgagccagagcctgacttagctctccaaaagtgtctgtttgctgggggattttctactcaaaggtgaaagtggaaagcagggaaggcaggcccaaccccaggcatctcccaccacagcctcccagaccccattatgtctcttcagcattgctcatgccactctcgggccacccatagggctttggcacacagacgccttcctaatcacccaggcatcttctcatgtgtcccccgctcagggaggctttctgtgaccactctgtccaaagtagatcatttcagccaggtgaggtggctcacgcctgtaatcccagcactttgggaggccgaggagggcagatcatttgaggtcagttcaagaccatcctgggcaacatggtgaaaccctgtctgtactaaaaatacaaaaattaactgggcgtggtggcccgtgccagtaatcccagctacttgggaggctgaggcatgagaattgcttgaacctgggaagcagaggttacggtgagctgagatcacaccactgcactccagcctggggacagagggagactccgtcccaaaacaaacaaaaaacaaagtggattgttttttcacattgcttattacaatctgaaattacctgtttcttatggttccatatagaacacaaactccacgtgagcaagaactttgtcttgctcaagctgaatcccaagctctaagaattttaccaggcatgtgacagatacttaataaatatttgcagaataaatgaattggcatgacaagtcctatgatagcatattctatatgccacgcacttctaagcactttgaaaatatgcaccttcatgtaacctttagagaagcccttggatataagttccaacaccaacccatttcacagatgaagaaacagaggcacagagaggctcggtaatttactggaataacacagctagtgagtggtaggaccaggaagtctggctacacagtcagagcccacgacctccacggccgatgtttgattggggcaggttgcccaatgcatgatgagcaaagtttgaatctacttccccgcactcagaaatcttccttacccattgctcctttctctctcattgttcctgaacgcattgtctaattttggcgataagcagcctaaaccatttaaattctcctttctttaatgttgttgattttagctaaaatgcaaagtgtagtgcggaggagcccagacggcatccactggagagtctgggattagttcattaataggttcggctactgcccgtgcggcagcataacattaggagctaactgcttctgaccacgcaccacttagaaccccacatttgcaaatcagctcaagacgcatgtcaccatgagagatgacagtgttaaagaaatgcatttttcattgattctattaatattagtaatacctcttattgaatatgattggtgtagacaatgcaaaaagtcgtttttctcatttattttcgaaatcagccagcatgccccaataccagccttgctctgtggacagctgctggctgtgagcattttatggagacggatatgccaggcctggtctggcctcttttagccctgcctgtaccccaacacatgcccaagtccagagcaggaactattggaaccatttacagcccattaagaatgcccaaagctgagcaccgtggctcacgcctgtaatcccagcactttaggaggccgaggcaggcagatggcttgagcccaggagtttgagaccagcctgggcaacatgtcaaaaccccatccctacaaaaaatacaaaaacattagctggacatgcacacctgtagtcccagcttacccaggaggctgaggcagaaggctcacctgagccagggaggtcgaggctacagtgaatcatgattgtgccattgtacccaactctgggcaacacggggaaaatctgtctccaaaaaaaaaaaaaaaaaatgcctgagaactgaatggagatttctggggaattaggttcctctataccccagggaagcctgcaaaggagccccctgatctctgagacacatgttctggtgtgattgtgttgaatgaagtcccagatgcagtgccactggcacattggcacatggagctcaaaggaaaggaacaggggaatgagtcggacctgtgtgtcttgtgccaggcctgccactctgcacaccggccccagccttacaagtctccctcactgtgcagtcctactctgaacgtttccacgttttttgtttttttttgcctcctagtttctgcttctccaagtccctgccttcacacatcatgacctcctgtggcccatccaccttgtggcaactttgctgcttttagcttcaaattcaaatgtggattgccacgctgagagaaagcaatgcctaggaaaatatcctggaaaaaaaaaaaaacaagaaactacactgctctttcctttactgccccttttcctttctctgccttttgttcaaagaggtatccaggaagtgtgaagtctcccaggatccaaggaggctgaggaaaccagcatagttttccctgagcaaatttcagtttaccaggcttgtaggaagtcagagccaaaaaaagaaatcagcattttggcaaggcccagcctggatgaatctcaaatgagtcatttgagaagaatgtaatgggctgcccattttacctagtggtacaactacctgcccaagaagagagtagaaaatgctactgcgggaaaattgcctaatctgagcttgagttgatgcaagaagcccagtttcatactgatatggttttgctgtgtccccacctaaatctcatcttgaattgcagttcccataatccccacatgtcataggagggacccgctgagaggtagctgaatcataagggcagttacctccatgctgttctcgtgatagtgaattctcatgagatctgatggttttataaggggcttttcccccttttgctcggcatttctccttgctgctgccatgtgaagaaggacatgtttgcttcctcttctgccatgattataagttttataagtttgctgaggcctctccagccatgcagaactgtgagtcaattaaacctcttccctttataaattaaccactctcaggtatgtctttattagcagcatgaaaatggactaatacacctaccattttctttttcactgttaaattacacattgggtttctgggtttatacatcagtctcatgatcttgactaatgtgagtccacacctaagagacagatccactctcagaatcagaatcaaatcttgtttctagatttgtgaggtggagaatcaaactacaagctgtgataaatttaccactaacaaatgtcaacctgcagaggcagccaccacccctccaccccaaccccaccaacaatccccagtaagtcccattcttgagaggagaaggcaggaaagggtacacatgagccacaacctaggacaatgattctcaaccctggctgcacagtggaatcatctggtctcaccacagaatttcttatttaactggtctggggtgccacttgggaattggggttttttgaagctctccagatggctctgctgtgcagtcaaacttgagaaccacagactagagcttggaagcacccagtctgaataaagaccaagagtggctgggcatgatggctcacacctataatcccagcaccttgggaacctgaggcgggagatcccttgagcccaggagttcaagaccagcctgggaaacacagtgagatcccatctcagcaaaaaatttaaaaattagtgaggcaaggtggcatgtgcctgtagtcccagatattcagaaggccaagcacgaggattgcttgagcccgagagttcaaggctgcagtgagctgtgattgtgccatgtctctccagccagggagacagagggagaccccacctctaaaagaataaaatatagtagaatgatttataatcctttcggtatatacccagttatgggattgctgggtcaaatggtatttctggttgtagatccttgaggaatcaccccactgtcttccacaatagttgagctaatttacactcccatcaacagcgtgaaagcattcctgtttctccacaatgagagactgaataaagaaaatgtggcacatatacaccatgaaatgctatgcagctataaaaaagaatgagttaaaattagctgggagtggtggtgggcacctgtaattccagctactcgggaggctgagacagagaactgcttgaacctgagatgggaagtttgcagtgagtggagatcatgccactgcactccagcctgggcgagagagcgagactccatctaaaaaaaaaaaaaaaaaaaatgagttcatggttcatgtcctttgcagggacatgcatgaagctggaaaccatcattctcagcaaactaacataggaccagaaaaccagacattgcacgttctgactcataagtgggagctgaacaatgagaacacgtggacacagggaggggaacaccacacactggagcctgtcaggggttggggggcaaggggagtgagagcattaggacaaatacctaatgcgtgaggggcttaaaacctagatgatgagttgataggtgcagcaaaccaccatggcacttgtatacccatgtaacaaacctgcacattctgcacatgtatcccagaacttaaagtaaaaaaattttttttaaaaagaatgaaataaaataaaatataaaagaccagagggcagagagtaggagcagcccacaggagtgctgagaagaagcctccagagacagaaaaggacttccaccaagggaatgccgctcatccttctccatcactccctcactgagttctgccaggagggcacctcgctgtaagtcaggcctctgtgtcagccgccaagaataactgcttgccctcactgaagttcaaaactgccttcggaagccagttagagcctataattagaattcactgcaactctggcaacacgcagcccatccaccgcccaggactccagcggcatcggctgtagcccggtgatttaaaaccacagtggacagattcgccacacctaatgtgcatcccttggtgggttgccccctctgatgtccactgggaaggaattgaattacggccttagatacaagactgagaagttgcaggaggaagtcgcaattatgcacagaactggatgggcaatttgaggagaaggtgacaagagaagctaaatctgcctcccttttgtccttcaagtctccttccagaaacccgttccagcacccaccctgccagagacgcggtctgcaatgctggaagcaatgtaaggggtggaggggtggggggttgagcttgcatttgaacctctcttataatgccagaatggagacagcataattagtcttcactttcacaagtaataaatacactcaaattaaaaatacatttgtaccactcatattacccctgcatatatcataacatgtaaatacacattctgcttgtcttttgctaatcatttgctttatattttcatgttggtcaacaggataaataaacgtcttcctatgtatctcagtatcattaatattctttaaaatgtgtaggttctcatttaaggctgaatgagcgcttttgcctatggccgtggaaacaattaggaaatttgtgaattacatgactggtttgcttgcatttcccaagctaaatatttaagaaagctttctctcatgaacaaccaaaagtttttggtaagcgcaatcattcagggagaagaactatggaaataataccaaatttggaattggaagcctctggttggagtcccagctcatgcataaaactattctgtgactttggccatcagcacctccctggggtttagcttcctcaccaagctgggaatacccttacctcacctacctccctttttaaatttaactcttattttaggttcaggggtacaagtgcaggtttgttataaaggtaaatgtgtgtcatggggacttattatacagattattttgtcacccagttttttaagcttagtactctttagttatttttcctgatcctctccctcctcccacacttcaccttctgacaggccccagtgtgcattgttcccctctatgtgtccatgtgttctcatcatttagctcccacttataagtgagaacatgcggtatttgggtttctgtgcattagtttgctaaggataatggcctccagctccatccatgcccctgaaaaggatacaatctcgttcttttatatggctgcatagtattccatgctgtatatggaccacattttctttatccagtctaccattgatgggcatttaggttgactccttgtctttgctattggaaatagtgctgtgatgaacatatgcatgcatgtgtctttatggtaaacaatttatattcctttgcatatatacccagtaatgggatggctgggtcgaatggtagtcctgtttttaggtctttgcggaattgccacgctgactcgcacaatggttgaactaatttacactcccaccaacagtgtatatgtgttcccttttctccacagcctctccagcacctgttattttttgactttttagtaatagccatttaccttacctgtctcttactaataggagtattagcagatgcccgactagagagagaccacatgaggcagggaagtgcaggaaagagagcttgtcacggatggggccagtgatggaccagacatcatccaaatggcccagggacgacatagtgttcccagagccccatgagcgggcccaggaacctcagaggaaggcctctgtgacaggagctgaatctctgccagatacctggccccaaagcagagagggagcttgagacagcacacccgccttgttctctgattcccttttgcagcctaccggtgggcaaatctaattggcactggccagcatgggcagcctgcagggccaggctcctggggcagggggagggccagggaaggctggtaaatgggtgatggggggtgggcaacagaggcctctccagagtgaaaatctccatcccacctcaggaatgaaaaacgtgccccttcccttcaagttttcaaggtgccttagaattcagctcccttcagccaaggaagcccccgatgctgagtgagaagggaagcacagctttaatcaaaagaatgttgatgaattaaccccattttcaaaaagttcagtacccaagaaagcaaagtttttcacattagattagaaaagattgttttccattaaaggttctctaagtactctgcccatctgcccagggatctttcccagggaagcacccccatccccccgcctcgcctcctgcaccctgaggtcagaggctggcatgggctggaggagagaatgaccagcaagcaggtgggccaggtaagagagtgtgcatgcccagaggaggtcagtcacctgccaccgcaaccatcctgattctcagcacatacctattggtttagtctctggtagtccagtgtcaatgaagaacaatgacactgatgtggttttgcaacaccacaggcaatcaaggcatccccaaatgctcatttcaccctgcatgtcctcaggagatgccccagtcatgtcctgaagtttcattttaggagaacatcctgttctggtacctgggtggacctcaagggttaatccaatccaagcctctgtttgatagataaataagctgagacctaaagaaaggatgtggcttgcttaagaccacacagcaagcaaatggaagagctcaggcttcccagctcctaggccagggctccttacttatcccctaactccccagctgagcaacttccatgagaaaatgcatggggatgcggtctttgtcatgatttagggaagcagggaatgcaggctctaaaattagactgcctgcgttcaaactcctgctccactagctctatgagtttggacacaatatgtaacctttttaagcctcagtctctgcatctgtaaaatggatacaaaaaaaaaagaatcttatcttatctcagggagtcattaaaagaatgagataggtcaggtgcagtggctcatgcctgtattttcagcattttgggaggccgaggcaggtggatcacctgaggtcaggagttcaagaccagcctggccaacatgatgaaacgccgtctctactaaaaatacaaaaattagccaggcatggtagcacacgcttgtattccagctactggggaggctgaggcaggagaatcatttaagcctgggagcaggaggttgcagtgagcccagatcaagccactgcactccagcctgggtgacagagtgagactccatctcaaaaaacaaaacaaaacaaaaagaatgagacagagcatgtaaagtactaggtacagagtaagcaataaaaaaatgtctgctgttgccagttcaccagaagatcactattaacgataatagctctatgttctgcattttgtcagccagacctagcacctgttccttgctggaacttgggatcctactggactagagaactctgaatcagctgagagcaaagctccttccatcatttcatggggagtcaaagcacttgtcaaagcacatccatctccacggaatgaggagacccatgcccacctgcagaggcagggcagagagagaagcatgaagcatgaatgggctgccccagctactttgcctggactttgacaaagctgggaatctggtatgtccacatgctaccagcctcccaggggggcagaaatggggtcatgctcactttaaataccaaactgtaatgactcgagccccaccatcttgattctggaactcagctctctcctactctcctgccctctgcaaagcacccactcagccgccaccatgttcttcccctgtcttctggctcccttggcccttgtctgtttccatggaaaccacctagcaaatccctggaccaaggagctgtctctaagcctccagggggcaccccgaacaggacctctgattgtgctataggacgggagaccaggtctggcagctctctgtcacgagacccttcttgcttctccttacccttcaacagctctcatccccatccctccttcctcacaccaccaatggcccccttcaagttctctgttatccagctgcacttttgggtccattcctgcacagggcaatcaaacagggcccggctgcctggaatcgatgagtctttatggagtcaggcatcccgacatccactgaggccagagcgagggagcccccatgagctggaggactaggaatgaaaaaaatgaagaaaaataataaaattgctattgcttctggatgaaatatcctgatagtcagatgaaaggagagcttgaaatcataatcataatcatctttggtctttgcctgtgtagacctggcctaaggctttaatgtaaacccatggtgattctgaaagctacatgaatagttcatttcccagcaaaactgccatacagggagacaaataatttaagtagggacaatgcttcaccagtatgcacatattagaagtttaaaatcacaacccagggaaagccagagagagaaagaaggaaaaacaaacttttttgtctcaatttctgctagctggaaagatcgttccattctgaagctgtcgtggtctccctggcagagcctcttttccctctgagagaaggagctgggagggggtgcctgcacacagatgaaacatagagacgggagacccttcttggaggagcaggggggaaatttagaggcagagatacctggctataaattcacaactggaaatttacagaggatatgtctccactctagaaaagcaaccaaaggcttattgacatgagattcatgtaaatgaggtctaatttctcaccccgggtgcacatcatcactttcctgagacgttggattttctgagtgtttcaccccacattccacccagaatcaatgtatgggttatagattattgatcactgaggacccaggccccagcctcgctttcagtgtcagaatgagagctattgttctccttcccagacatttaaccgtgagtcatcacacattttcagacatagagcaattatttattgtcatgttatgctacccaagcttgtcaggaatttaaactgaagaatatgtgcacgtgccatcctgaggcagtattctagatacatgaggaaagtcagaaaaacgttactggtccaagaacaaactctaaacgtttggcttttgattctctgtctaatatatagcaatttcaatgagactaatatcaccattctgtgaacctgccagcagatagaagttcccacattattgtggtctgtttccgaggacaaataaagtatgctgctctccagtgttctgtagaagcacgccacgctatagacagaagtgtttcaagtcaacacaatatgaaaaaattcaaaataaaatgaaaagtgtctgaaaacaaaccaacataaatatacagcagtcctgttaattatgattatttatgatcataagaactggcatcattactgtggtttcctttccaaaatctcacaaacttgttactatacagcagtttcggagttctataggcttaaaaaggtggcgtgctggaggcaaaagtcatttttggcagggatgacgtacgtcccgaatgtgagggcttgcacccacgcaggcacgtgtgtgctgctggcacacaatagagtcagcttggactttccagggtcccccaacgttaaaccactggcaatgcattacagatgtctctgatgagcaccgccaatctattaaacaaagtgctctcatcgcctccgaggggcctgaagaatgatctagaaatccaccccctggagggaaacagcctatgaaacatcaaagacaacactgaatatttcatcagggataacaggacttttctctttgtagccctccccgcttttccactgccctgcctgccactgtctcccccccgccctccccaatctttttctccactcacttgacaagtagtcacggccacatcactgccgtcccgctgtccttgcacgctgacctctgtactgtgtggtgcccagtggtcatgctgtcctcgtctctcaccaaccacatctgacaggagacgaggcactcgtggcagcggctcctggcacctgagacaccctgggactacacaggtaaaccaggggggtctgtgttgtctccagactaacaacagaaggaaagacatgacatctccaaccaggagcccacgtccgaatattcaaaaggttcatcatgcgggagatgggggcggccctcccggctttccaggatgaggcctgcagaagtcaggagggatgacgagaggaggagggaggcccacacctggtcccggcccaatcaggggagaagaagaatgcgggtgtaacagaccagcgatgtcaactccggggtgagggtgcaggggagtgtcagcccctaccctctccagggacccctcccaggcaggcttcagacccctagacatgtgtagtcacacaggcagctgagagatcggctcttcctcggggacacagtcgccacccagtcctgtggctccttcagtacccaaggagacaacgaaggttgattagtcaaaaaagaaaatagctcctttaaaaatgacatggcggttttgagttgctatattttcttacagctcctttttggtgaatgtcggagtggagaaaaagcatgaagtattttgactgaaataaatgctttcatggaaaacagagagccctagagagtattctaagactggaagaacgtcatactattttaagcaggtgacagtaatgtcactgtctgaggggttagggtattttttttccctagaattacaagaggaaaaaataagtttgctttgaatagagaaagttaagtaaagaaacacacttcccagttgcatggataattcatagactgcagtgacatatttccctgctcttggtctttgacaaaactaaccagtactattaggcagagaatgtttgctagctccaagcagaaaactaaataaagtacaaacatactcttcaaatcactctgatttttccaactttcattacaccacccacatcaacatggctgcaatgcaattgttcaaaaccctatcccagctctccctctgtttatcatggacagagaaggtctggggaaaatccggacagcacactttatctaatgagcttaaagcttcttccaggctactggttattttccttttcttccttgatagtactgaagagtcaatagaagggtagatggcattgcatgttaccttctagtactaccagcattaatggagatccttcctgtttcagtacacagcactgaaatacacacacacacacacaaaagagtcttgcaggccaggcgcagtggctcacatccgtaatctcagcactttgggaggccaagtcgggcagatcacttgaagtcagcagtttgagaccagcctggccaacatgatgaaaccccgtctctactaaaaatgcaaaacattagctgggcatggtggtgcatgcctataatcccagcttctcgggaggctgaggcatgagaatcgcttgaacctgggaggcagaggttgcaatgagccgagattgtggcactgcactccagcctgggtgacagagtaagactgtcagaaatcttgttagaagacttcactaggaccacatccatttactgcccacctcttcaccccaggttgctggctgccatttggcagctgtttaagagtggctcttgggagggtaggagcagtcctgtggcagctgtgttcttgggttccatggtgaggccatcatgaagccatggtgaggctccttctgggccaggagctggaacggatgaagaccccagctcaataggtcccatggtggagtccccgcccccactgtcaccacctctcaccttcccacgtgcaggtacaccatctatcatgaagagaaaatgtgctttccactcccagctcagcaacagcacctggggccaggaggaagaagagagagaacagggaggtgacttcgctggggccctggtgcctctgagctcaggagaatacccagaagataatatggacatgtgaagagtggttcaagagcacacctctgccagctgaactgctgctgctgctgtacagttcttggggccagaccaaccttgaatgcctttgaggacaaagccatccctccctagatgagacccaataatcagtctccttggaaacatctagctccctggcaactacacccactcaagctggcccagcccctcttgggggatggaagagtgcctcagatggatttgtatcaagaggctgtgctctgaatccccttatggggtcttgctaagctggaatcccacatgaagtcacaccgtcacggggccttctccactggggcctccaccacactgacgccactcaaggtcagggactctccaactacaaaagtaagattttcttctgaagaaacctcacatcccaataagctcagaaggaataagataactgctttcataaccacgcagtgtcttcttttattattttttaaagggacaaagtctcactctgtcacccagactggagtgcagtggtgcaatcgtagctcactgcagcctccaactcctgggctcaaaggatcttcctgcctcagcttcccaagtagccaggactacaagcacaggccaccacacccagctaattcttttaattttttattttttttaagatgaaaggagagacccaatcttgctatgctgcccaggctagtcttgaacccctgacctcaagcaatcctcctgtctcagcctcccaagtctctgggattacaggtatgagccatcatggctggcatcttgtgtctgtaaagcgaggccccaaaatagtgcaccaggatggcatgggacttcagagcactatgtcaccctgatgctacagacccctgcttcccaccagcacagcagtggcagtgtggcctgccacatacacaggtcatcagcccagagagagggcactcctcagagctgaaatccagagaagggtggctgtgctgcgtaccctgggtcctcatggggctctaggaaggcggaactgaggccagcagcatttactccagagcagagaggagtttcagaattcacatgaaataaaacaaaaatctaaacccaagctgagatttcattacagaatcccactctagggctgcaggagcccccatccccactttcactccactcccttggctgtccagatgtccaggttgggtcgccagaaaggccagttgccccaaggccccagagaatgttctgctgctaggccagagcaccatccccaggactactctccatgcatggccagctgcctagttgggtttcaccttggttatttggtgaatatctatttggagcatgttcttatctcagcagacacttccaataagaagactgagccaccaggcagatgttataagcaatgtgagcttgtgctggaagaagagagaatccaccagtgtcctgggccctccaaggcctctctgagggaaagacatttggacagagatgccaaggacaaggaagaggcagtcacccacctctgggcaaggtgcaaaagcccaagattcacgttcatgtgttgcaagcacaaaaagaagatcctgtggctggagtagagtgaggaacagtgagaatggtaggagcagagggcagagaaagtggcaaaaacaaggtcgcatgaggccttgtaagccatggtcaagaggtgatattttattttaaatgaatccaaagtaattgcaagtttttgagcaagtaagcaaaatgctcctttgcaaaaaacaaaaaaaaaaaaaaaaaaaaaacaaacaaacaaacaaaaaaaaaaactctagggcttcagtaaggcaaacaaattgtgagtgggaaagagtggatgcaggacttttaggcaagggtggggtcagggaagatggagaagagaagacataagatgtttggaggtggagccaacaagatgcattattgactaggttgcaggtacctggcaggagacaggggctttctcgaccactcatgcaagagaagagtccaggatgctgcttcagtcacctgtctgtccacaatgacaatggggcatgaaaaaatgccctaactcagggcataataaaataattagcttttatttagtacacaagtctgaactttgcattttaggctgggctcggctgggcagttgttctggttttgaaagggctcattcacatgctggtggtgggttggctgttagctgggataagaggtaaatgggccatttggctcccaccctccatgtgaggctggcccaggcacatcctcatggtgaaggccaaggtggaaaactggaccagcccaagcacaaagcatttttcatgcctcttctcctgcttatttgttatcgcccctttggccagagcaagtcacaggacagatctcagcatcaaagtggatggcccttataaagatagatggccaggggtgaggacttagaccactcatgcaatctgtctacccaccacacaaggtcctagatgtttgacttgaataacagggtagctgaaggtgccttttattgccatggggcaaactgggagaggaatgcattgtagatggcaggaatcagggattctattttggcttagggacctgccgggcagctttatgctccctaagcactgagtgagggctcatgggaactgctccatgcctatgggtaattctgctcttctggttttgaataaaattcactaacctggagtttcaaagtcccaagaaggcaaaccttctgatgatgatgccagtgagcctgcattcaggtgacaacatggcaaagagcggttcctccccagtcccaaagtgacacccgtcagctgaacagtgacggacatttgtcacttgccaaacagattccttctgtctgtcatgtccccatcctgtctccactgcagaaggagctggagcctccttttactgagaggctctccaatcttatgctgatcgttaactaagatatttctctccagagatttattacattaatgagctctgaaattactcatagcaattaagtatattgtttttaaactcttcagaaatcatcaaaacacattggttgtttttcagggaaacataaataaagggtacaacttgtcacccaataaatcctgcagcctgctctcttcatgttggtttggggagtttctggcccctagtctccaaggtgtgccttcacaactgaaaggtgttccactagtgaaacttgtcctttttctttctttcgtctttcttttcttcctttttctttctttcttttgttctctctctctctctgtttctctctctgtttctctctctctctctctctcaactttccttctttctttcatgttattgttttactttttagagacagggtttcagcttggcatggtgactcagacctataatcccagcattttgggagacaaaggcacaaggattgcttgagctcaggagtttgagaccagacagagcaacatgacaaaaccttgtctctacaaaaaacatgcaaattagccaggcgtggtagtgtacctgtagtcctagctactggagaggctgagatgggaggatcacttgggcccagtaggcagaggctgcagtgagctgagatcatgccactgcactccagcctgggcaacagagtgagaccctgtctcaaaaaaaaaaaaaaaagagagagagagagagagaggcacagaactcaggtccttctagatattaataaaaaggaacttcttacaatctgtttcatttagttttcacaactagaagggcaaactcttattattccccatcttacgaataaggaaactgagacacacagagggtaagtgatttgcttaagttactgtaggcttggagttttgtacctctccagattctctctccatgcagggaggctgcccccaaatggactacattatgggctctgggtcagtttcagccaatgagagctgctgtatcagatcagaaggtaggaggagagggaatgggggtatttgttctcccagctgcctcctggaagggatgctacttgctgttgcttctttccattaatccttctctgtcttcaggctccaaactactctttcccaacatccatgtctcggcctctccctacccaaaccctaccctgtggactcctaaactccacttgctcctttgtcaatggctctttcactgtttcattaaagccttttttttttttttttttttttttttgagacagagtctcaactccgtcgcccggctggaatgcagtagtgcgatctcagcttactgcaacctctacctcccaggttcaagtgattctcatgcctcagcctcccgagcagctgggattacaggcacatgacactatgccccactaatttttgtatttttagtagagacgggtttcaccatgttggccagtctgctctggaactcctgacctcaagtgatccacccacctcagcctcccaaagtgctgggattacaggcgtgagccaccacgcccagcccattaagccctctttgatttgcatactttgagctttgaacatgccatctgcttgtttctaggccccaaactcccaaatctatactctaaccactaccccacattccctgtgtcctgcaccccagaaaacaagaagcttgacagacggcagggtaagaaaattactggtacatttttctttcactcttgaagctaaaaaaaagacttgagagcttcttacattctgagccctttggcaggactttgttcaccttggtgggtgatgggaaggacagaggagccccatcaggaacaccagcatggaccctggtggcccaccaacaccagcacaccagcacagccctagttatttaaatacatgagaggacaatcacagaatcttcgctaggctctgccgtgggctgtgcagtacagaaagagtgctgacagtgtgtacagaggagaaaggagagacccaaagtcccagggctggagaaaaactcaccagccagcccttcctggaaccccatgtgcaaggaaactagcttacttttcagcaggagcctttgagtctcaaattcaagtgagttagccctggtcactgcaaccccagcactgccagagggaactcggcttggagggagggatgcctcttccactctccagcacactgcaaacccccattcacagcacaggatgaaggcctcactccggagctcagggagatggcagtgtcctgaatgagatcacaggacaggacaaagagaaagaatgtgggtccagctccctttcccattgggaagtgtctttgcttcccaactagaatctgtaggctgcctggagctcccctccccatcactccctggcaccagccatgctcacttcatggggatacgaaatgtctcagtggtgtgcaccttagtttctagcaccgttaaggacccagatcaaatcccttttcctccatgaagctaggctatgggaggcctctctgagctccatttggacttgctaaggtgtctcatgctgcctcaaccaccccacaggagcccttttaggcagggggctgagccttcatagctctcacatctccccatctcacatggacacataggccacactccagaaacactagctgttggttccaaaaggcagccaaaacagagaaaattgcagattcctggggctgaaaaggacctcagagaccatctggaccattctacaggtgggaaaactgatacccagaaggagaaactagacaaaaaacctagatgcaaagctagaggctcctaatcccaatccagggttcctgagctattgcaagcccatcccagccttcttgcatctacttgcatttctcattgccccgtttggacccccagaagtagccaacccaaagagcatcaatatcagagcctctcagagtgtgaggaaggcactctgtaagtattagatgcacagtggcccagggattttttttaagtttagcaataatcaatgtttgctgccaccaccatttcctcaaggattgtaacccagagccctttgcaagtccggggctgtgtgccatttgacctcattggtaggatggtaactataaaaggcagttgtgtttaaaatgtgtccattaaaaattaaaaccttctaggagcttaatgccaaatgtgcagattccacctccttccactccctgccaagcattccatgccaataaagtgtaatggttttaatatccttcaaaattaacataggataaggcaaccacattaaaacagcaatgaacaaatccctcccccatccccccaaaataaagaaactaacaaaaggggatgattgaggcttggtggggtgagtcctgagggcagaaattctggttactacaggaggtctctgaatccagacttgggaagagctgttggggtatctcttgccagggagagaagactgtgagaatgagatcttcatttgcaaggtattgcaaaagctggggtgacttgctagtgcccattcagaaagcacccactaaaaccccagcacaaatcaattcatcctgaactgagctcctgcaaagagacattaaaatttgtctgtgcataataatgggaacagtagagactataagaacagggagggagtggggaaggactgaaaaactacctatccagtatcatgctcactaccctggttacaggtcaatcgtaccccaaaccttagttaacatcatgcaatatacccacatcacacacctgcaccagtactccctgaacctaaaataaaagtaatgaaactattctaaaattgattttggtgatagttgcaaaattgtatgaatataataaaaccattgagttgtacaccttgaaaaaaacagaaatttagaagttaataagtaaataaacaaaaacttaaaaaaaaaattgtctatgaatagcatccagcacagcagggccaggaagaggagctatcaaggaaaagggggccccacccatcctcaggctcagctccagcccccacccagcccccctgcagccgcagaacccaagattctgaacctcatcatccccccgccaccagctccagccccatcatacctcccacctccaagcaggtgtatcttcattgaagtgatcccttgaaggaaccaaacagctaaactcaagcaagaccaaggatcaaagtggggaccgctcagacccatatgaacagaactggccacagtgacgtgtccaagaaagcccttgtctaagaggagctaacaatggcgccacagagaggccacggccaggctctcgggcaccatgatactacagaaataaagctaaattataccacttgtcatcattaagaaaaattttcatcttctttcttcatttgaaaagcactatatttaatgaatgcgtactgagtcatgacacgcaaacgactaaaatacaggaattatactggggtcaactaacgtattttaaaaccttgaaattaagggacttattcatgcctgtcaccagtgtgactcccagtcattagggtcctctgcatggctgcctgtgagcaatggggaatggcggatatttctgcaaggggtagcccaagcttccttgcaaattccatcatggtcaagatgaagaaatcttgttcacctgtttgcccaccttctgtgggcctgtgctctctttgggtgtgtatccaatgaaggcattactggtcttgtgcaaggtaagccccattccaaaggcatattttgcagattcatcactaatgaaaggtggagctttgacacctcctgtgcttccacaatgggggcccataccaggtgtgcatcagaagagtggctctttctcaactgcattcatctttaatttctccaggaaaattaagatgtctcaaagtctgaactctgcaaaagtttgcatgaaaaatggcaaagaaaaaaaaaagatggcaagatcaaccaggaaacctgaaatgaggaagtttgaactatcttccaaggtcttgacacctttaggttgaagtgggcatatttttgtttttccaccctccaactatcagctcttttcttggtaaagcagtattctgaatttcctttggtgaagccacagcttccattctcaagcatgaagtttgagtagggttgacctcacatacagcaccaaggttggatgccgttgtaagccaatcagtttatgcctttatccgaccacaggaattcgtggcccaattctggtcaagttattgatgattgcatatagatacaaagatttcatctgccagaaacacatatattcatgaaaggagtgcttagagctattggaaggggaaggtgatattgtgtggaagctgatgatgatgccaataccaagagggcccttgggcacaccttttattctgctggatcaaacctcacctgaagcagaactttgttgtttacaaaggccaagataattttctctcttttttaatccaatgagagttgggtgggttttatggcatgcagtgcttccagaatgtgaaaggccctgtccagaatcctatgatctagagcatacagaagcttttcaattgccttgcctccaataaacacaaagattactggactcaaagtaagtttcagtaaagagagtcagtaaacagtaaagagaggcagccgtatcagtagcaagacacatggagctcccagcttcctgagagctgggggtcaggtcacataaaacctcattgtttatggctgacctcttttcttatttatcaaatcccaaaccatcctagtcttttatacttggaaactacccctgccttgaactgtccaagcctgtcactgattaacttctctctgctaactaggctcactagtatctctgggattctgatggggacatacaagcaagaaaaatgaccaaaattccccccacccaagttgtccataaaacatgacatttgatcacatactttgaggccgctgcagtgttaaaagatgaagcttagagaatgggaaaagagaaagctatgatagaggagtctaatatcttcaactgtggcaagaaagagaggttgaggaagacttcacggttgtttctgtcttcccagcattcagatgaggatacaaacatgaaatttcaagctctaccaaggtggaaaacgtcttaaatgtcatctactctgacccttaatttaatgtttcatttcctgtcccaacctctcctacaaatgtccacatagcctgtgttgaatacttctgataatggggaactcactccctacctccctcagagacaataccttttttgattagtgttgaaagtctcaagttttcccttgttctgagcaaatatccatatctctgaagctcccacccattagggatgtccagaactcactgttctctcttcatctggaagctctcaaatatagaaagccagaaatcacggtcccctaggtgttcctatgtctggattgaatattctctattcatttttcacattgccttggttcagcatgtctaaccctgtcccaggctgtactgatcacaatactatctagtgtggactggtcagcatggcaagatagagatccttctcatcacctccatgttctttacactatactcccattaatacagccacagttacactgtgattagacagaccagtagggatttagaccagtggaatttctcctccttatttttcaacagaggtaagatatgctctgcttataagaaatccaccttaaaattgtaatcgatgctcccacattttgggctggtgagaaagcacattgcctggtggtgagttaagaacatgccagtctccatgcagtgggagggggaaaagaagtgttttcagcttcaaagatgaatgtgtaagtaaaagtgaagtctaccaaattgaaactgatcaatgtaggccacccatcgctaattgtcacccagctattttgcttccacgagtcacgtggtgggtgacagccagagacattgatggattctgacctagactagaaatctggtttctaaagaagaaagaaaggaaagagagaaagatgcaatgaaattaacggcccagcatgaagagaagggagtggggaaaaggcggtgtctttgacagctcaagctgaggaggaaaattagaaaagaaagccgactccaccgccatatgtgttagagctggccgggacagctggaagaaatatcgcccagcccgaatccctggccaggattgtgatccatgtctgcatacggctatcaataaccctgcatgattaatgctaatgatttatgttaattttgccataagctttatttgtgcccggtgttgaacttatggatgtcaaatcattccttaggaggttgctagagatttttaaaagcaaagtctaaaatataacatctgacattccatatatcacagccccagcctccccaacattctttgtgagatgagggtcaccatcccccatgtaattgcctctcagtcagcaagaagtctttgggaaaggctccacgttacaggaaggatagctccacagggacctgcaggttcctctattttggggggttggtgttgcaaagtccatccctgacaccccacctgtctccatgggctaccatttatccaggaggtaggggagtgcacagtgagctccttgagtttcatcttaggtggctgtgaaccagtcacttcacttagagagcccacgttcccttctgttccataatgtggtgggtgggggggtatgctcagcccacttgcaggaaacctgggaggctcagactctgtaacaccatgggatgctttgtgctctgtaatgccccccatacccaatgcactgcattctccaagactgctttgagggtctggttgcatctccagaaccaaggcataggggctgggggtccagaggagatctgaagatctggcctttcaggtcatcacctgcccaccttgagtctgtccaaacatcagtcacttatccagatgacccccctttgatacctcctctattcactcccaaaagccagtcaacacccttctatgagtctggccctctgcaagattctggacactatggtgtgcaagaaaggtggggccaggcagcaacttcaacctctcagatatgctgaaacttaagcctcaaggacaaacccagttacagagcctagtacccgatggtggtgcagcagagtgcttcaggtgtctaccctgcagaggacaaaaggaggccaggtcagacagatacagtagaaatggaaagagggtgtcactatctagcccagtgcagcggcactggatgggacagccatccaacattaatgcagctcacttgggggttcaagctgaatgcaagtcaggggacctaggggcaccaacgtagcacctctgctctgtctgtccctcactcttctcatgaaatcctgtccaagactgccactgtcctctgcaaccacaggattcccccagcctcccccttggctccagtaatcaggattccttcaaaagcccactgaagacccagggaccggtagcttttccacctgtaaaccactcaccctgtcagcagcttccctgccttcaaaatgaaaccaagatccaagccaggacccaaataaaaacccaagccatgggggaggtaaatctcctcctcctcttctttttccccacatctcttgctagaaagtcattatctatagcttaaaagaaacaatttctctatgggtttgtaccaaaaaggaaatattctatctgctttcttggcttcctctgatggggcttcacgaaaccagtttggtctgggctgtacggtgaacacctgtcaaaacgtatggaccatgccatttatcaaataatctgctccaagaacagataggcactatcagcaatctggtattgatctgtacaggcccctgctattgttcatccctgcatcccgaatggcagcaggaattaatgaaagaaacaaaacaatgcataccaatcactcagccgcacaactttgtttgctgctctcattaagttgggcaaagtttccccagctaacccaaaagcttgcttgggaggggtgggcccagaaggccaatcctctgattcaccaacagcccctctggctgtcccagttcctcttcctgacctccatggagcccttgtcagatgcccctgcacctttgacacctatggaagtggaggtgctagtggcaggcaaagaccccacctgggtctctacccgggtccaagcagagatagcctttcttctgacagcccctttgtggttgtgtttaagccacccttgtgcagggccctcctccacatacagtcttgcaccgggaagagatctgtccacaaacaacacctaaaagcccccagggagtgtctaggcatcggggagaaagagtgagtcaaaccaagccttccccctaaaggcaggtcctgcagagagatacatacgaatgcccagctgtgggcctccactaaacagtgagcccttccaacacacacacagtcactcctgcctcaccatcactgtccatacctgagcaggcttcaaggctcagcttaaatagcacctcctgaacccttctccaatccctccagccaaaattggtatctcccccatctgagcactcaccatgctttacctggcctataaaaagtagtactgtttatatctcctccatctataagacttatgagtagaggtccaggtaaaacaagcaaaaagaaacctctgaagtcaaggacatagttgcagtcatcattgcagccctacatagcatctaacactattaacaatgggtggatggataaatgaatggatgcatggatgacagataaatggatgaatgcatgggtaggtgagtgggtgaataaatggatggatagatgaatggatggatgaatgtatggatagatggatagatgaatggatgaacagatggatggatggatggatgatagataaatggatgaatggatgagtaggtgagtgggtgagtgaatggatggatagatgaatggatggatgaatggatgggtaaatgtgtggatgcgtaggtgggtggatggatggatggatagatggatggatggatggataggtgggtaggtgggtgggtggatgggtagatggatgggtaggtggatgggtggatggatggatggatggatggatggatggatggatggatggatagatgggtgactggatggatggatagataggccaatggatggatgggtggatgggtggatggatggatggatgggtggatggatggatggatggatggatagataggccaatggatggatgggtggatgggtggatggatggatggatgggtgggtggatggatggatggatggatggatgggatggatggatggatggatggatggatggatggatggatgggatggatggatgtggatgggtgggtggatggatggatggatggatggatggatggatgatgaatggatgaatctgaaccacgtgggacaaaaactcaagagtgcaccagttccatagcaatgagctcagagtgatggcatcctgatgatgggcagcactggggatttcacttttcttcccaaagcacaaaagtatctcctcctactttagccatagtgccaaaaaggagacactgaggtccagagaggatgaagaatttgctttggatcatacagagccagcctcaaccacagacatcctgaaaataaagaaacttactcgctgtctggtataatcaagaaccccaccccatcaccccttcaggacaaatatctgaaccccacttccaggaagttttaaggccatggcagaacaaaaccaccaccatagtcctgctaagtcagtgagtgcagctgagctcacaccacacctgagagacctgaagtcctgttctttttggaagcatgacttggagggatgccttggttgtccctgttgggggttcagagggtcctgcgtgtcacccgtactgagagagtgaggcctttcctctttggaggaccctccttgacttggaggaagcctcagcagaaaaattgccaagagtgaagcttttcactcagctcaagttttcaagagcggccactcaccccacattcaggagatgtagcagagagagtggcactgaccgaagtctcactcagctaagtggggcctcaagggggccaagagacacttacattctggaaaggcacagaccaaagggccaggctgggccagccagacatgtgacatgcaattctctgaggacagatggcaaatctccactcatgcagggcccaggtgtggggtcattcccccttgctcccacccagagtctccctacagtatcatctggacactgggtcctccccaagggccacatcacacgtctgcattgccaggacaggagaagcagcagcagcttctgtttccaagtaaagatgacaagtgtggatgaggagggcgggtaggccggtgggcggggaagagaaaggaaggaggagaaagtcagacagtgacagggaaacaaataaagctaaagccttggttcctgcccttaaggatctcagaatacagtggagaaggagaaccattaggtcacagactcaagcaaggacaagaaaccaaaccaaaggtcctgtaaccaaatgcaggttcagtcactcacccacccaccactggcaaagtcaaataataaagacgaggtgtggtggaaggaaagtgactttacttccaaagctagcagtggggaagcagccaggtgcatgcctaaagaaaatgcttcagctttttgggtaaagggtaagaactttaaaaagggattttggtatgtagcacatgcaggagtgactggggatgctagtctatgtgacttgttttgatgactgtcttgagctgttgccccatctggtgaatggactggcaccatctcaggtagaactgggttgcaaattaactgcagccttgaagtaatctccaggaggggagaattccacagtggcttgaattgttttaaggtttagtctccggaacttccaaacaaacacaaaattaaataagggaatcatcatgcaagcagtgcctggcagaagggagaacaaaggctattatctgattattagaggcaagaccaggaatgggcaggaaggagaaagaaaagaaaataacgtttaaaaacaggacacttgctgggcatgtggctcacacctataatcccagcactttgggaggctgaggcaggaggaccgcttgagctcaggagtttgcagccagcctgggcaacatagactccatctctacaaaagaattttaaaaaaaacagccaggcatagtggcacatgtctgtaccccctgctactcgggaggcagaggtgggaagatcgcttgagcctaggagatggaggccacagtgagctatgatcacaccactgaactccaactgagatgacagagcaagacgctgtctcaaaaaaaacaaaagaaaaaaaggtcacagtcccatgcttaggagtgcctcttcttcaggaattctggggatattcagaacgttaggagggattccctaaatccctcctttctaagcttccaaatatctcttgtccagagctcaccagtgggtaggccaggatttggggatagaactgtgttctcttgagttcctgcaggcaagtgccacaatgatcaaaggtggtacccacccccagtccagctgacctcagcaaagtcctgtcttccaaagcgggtcagtcctcacctgctcttctaccacaattcaggtagaaatgcaggttgagtatcccttattcaaaatgcttgggaccagaagcattttggatttgggattttttcagatttgaggatatttgcaaatataggatgaaacaccttggggataaaacccaagcctaaacacagaattaatttacatttcatgtacacatgaaggtaattttatacatttttgttgttgttttgtttttagaacaaggtctggctgttacccaggctggtctcaaactttcggcctcaagtgatctttctgccctagctgcccaaagtgctaggattactggtgtgagccactgcacccagcctacaacatttttaataattttgtgcataaaacaaagttttcttttggtttgtgttttgtttctttttttgagacagagtctcgctctttcacccaggctggagtgcagaggcacgatctcggcttgccacaacctctacctcccaggttcaagtgattctcctgcctcagcctctcgagtagctgggattacaggcatgcaccacaacaccaggctaatttttctatttttagtagagaatgggtttcaccatattggtcaagctagtctcaaactcctgacctcaggtgatctgctcgcctcggcctcccaaagtgctgggattacaggcgtgagcgacagtacccagccatgaaacacagttttgactgtgatctgtcacatgaggtcaggtgtggaattttcctcttgtggcatcatatcggggcacagaaagttttggatttcagagcatttcagatttcgaatttttggattaggtatgctcaacctgttcagcattcctgagcaggcaggactgctgggactcacgaaggtaggaatgaaggatgggttccttttcactgactcctgtcccattatagcaaaatccccaaaaccccgagaatgtgctggagagcaggggttccagaaggcagggagagggcctcacagggccttatccaaggaatcctaccaaattcaagaatgcagaaacggaagagcctctggcgtgagccccaggccactcagcaatgtcactcgctgtcccggttagtgccggaagcaccagggctccggatgtgaaaacccatgctgcacatccactcctgattgcactgggagctgataaagggaagtccaacccacagcaatgctgctcagtgctccggagaaagccattaggccaggtccccatgctgtcgtcagccactgagggttgacacccacatagaacccggagagccaatgggcacagcctggccatgcagccacttacatcacctttggaggcagaggccctgccatgctctgggacatgagcagctcaggacagagcacatggagctcaccactaaggctcatacattcaccaagtgaccgtcactgcccacacatgccccaccctgcccttccagcatccacacgcacctctgggcacacagccagtcccacagaggcctgacaccctgacactctcagcctccatcccagtgcccacaggcccgctcatctaggccaactccaagaaagctgacagagcagcaaaatccaccttcgtggccctggagcggtgacaccaggttcctcccagatggctccagtgagcccaggggccattgcaccggcacgctgcagctgcctctctgtaggaagataccactttagaaataggtcatgtgtgctgcctgcatccccttgaatcaaatgggatggtggcttgatgggttcttctcaggaccctgaacgccaaggtctccatcctgccttcctttccatgaccatatgacatcttcaccttggaaataagctgccagcttgctctgcaggcttgcttgagaagagctgatctcctctctctctctctctctctctctctctctctctctctctatctatctatctatctatctatctaatgctagcaactcatcagtgaacccctccctaggaaagcagccatttcaatcaaatatctgcaggtgcagagcctagggcatgacgctgagcaagatctcagaacatggtgggacggagacccataagatcacagagttgagcaaggacaaaaaaccaaaccacagccccaaacctggcagcatctctttgggaatgtcaagcgagatcccccaaatgcctccattctgagcttccaaatgtctcttgctcagcactcacccaggctctgacatcccctgaagaccccagcaaagcctggatatggaacaccaccatgggtggaaggtttgcagggagctgtgctctgtagagggaggcacaggaaagaacatttaggtaggacttgctcatcctcccaggcggcactgctgtcatgggaatgggggccacttcttggcaattaggatgtttcatgctgctcagccctgaatgctccaacacccataaggacccattcaatgaaggctagatgagggggcacctgaatggtttggatatttgttccctccaaatctcatattgaaaggtgatccccagtgttggaggtggggcctggtgggaggtgtttcggtcatggcggtgtattcttcatgaatccttggtgccctccccatggtaataagtgtgttctcactatgttagctcacccaagagatagttactaaaaggaacttggcacctcttcttctctctttcttggtacctctctcgccatgtaacacccctgctccctgtccgctttcccccatgattggaagtttcctgaggcctcaccagaagccaagccaatgtggttgccatgcttgtacagcctgcagaactgtgagccaaataaacctcttttctttataaattaccctgtctgagctattgctgtatagcaacacaaaatggactaacacagcactcaagcaatttccacccccacatcccctcctctgaagccatgactgaggtcacacagcaaggccaggatgtggaagaggttagccactagaaagtcactgtctctctgtggcctggcttggtttgacatgcacaaattattttttactttaattatcccccatttaaaaatcaggaggctttgctttttagtctgtactaccacttctacataaataatggaggactaggcaattctgggttgcattcctacctggctaggtcagctggggcagggcagcagtaagtggccctctctagcccatgccactgatggcactacctgcctggcccctagaggtatctggtttgcaactctggggtgaagcatgactgcagattgagacatgatatggaagtttccagagggccagtggggtaacagttggccatagtaagccatgcttcctggtgaccctaaaattatgtgagttggagagcttattcccctgtgaaggatgctctcctgcacgtcaccaggtcaccgggaagccaggaaaactttgctgactgggagagcagaattttcagagaggcaaggccaggtttctgggaatccctgggcaatggggccagcatcctggctattctggattttactgcaagtgttcgcagctgatgcctgtttccaggagtcaggcaggcttgctttaaatgcaaagaggggccgtgattgactgcagagatccagtaaacaaagagggttaaaaaaataaagctaggcttcctgtctgccctttgcacactaacagctgctgtttgctcgggcttccacatgagtaacacgggcgccctgatttctattatacagaacattaataagaggaagcactgaccctcgattgctgagaaccaggtaaatgatggggagggaaagcggccgagaaatggtaagcattttacaccgcacgacttgaaggggaatgcgttgactataaagatgacgggtgttgtagcaccgaggaaaaaaacataatttttcattgatgtacggcagccaggctggaaggaacacaaacactacagtagatccattaactggatgacaagaaacagtgttcacatccactcactaaactgtttttgattctttagtaccaacatgcagaatgatccttacattatgttgccagggaaaaaccttaaaatgcatttatttcataatgtaactttcttgtattatcataacagagccacaacagttgttgcaaacactatggggtctaaaaaaacacctaagtacagttattaaaggggaaattttttcaaagggggaaatgttgtgtgtctacaaaagtaaggggaaggagggggatacagctcaccttccacctctccttctggccacgggagttccggaccctgagcaccctcagtcaccgcggggcagggctggggaggacctgggagagggaagtggaagacgtgaaggtattcatgcccagtcactctgtgaaatggaagatttgcagggatggataacagtcactgctgccatctagactctggctattccattcctacccttcacatgcccctgtacttcctcacctactcccggtaccctggactgtatgtcccacctatataatggggacaaaaatggtcatttggggcaaggtgttgtggctcacatctgtaatcccagcactttgggagaccaaggtgggaagatcccttgaggccaggagttcaagaacagcctgggcaacacagcaacattgtctttacaaaaaaaaaaaatatatagctagatgtggtggtggctcatgcctgcagtcccagctactcagaaggctgaggcaggaggatcacttgagtccagcagtttcagaccagcctgggcaacagagtgagaccctgtctctacaaaaagtttaaaaataagtcgggtgtggtggtgcatgcctgcagtcctagctactcaggaggctgaggcaggaggatcccttgagcccaagagtttgaggatgcagtgaactgtgaccgtgccactgcactccagcctgtgtgacagacactgcactccagcctgcattacagacactgcactccagcctgtgtgacagggcaagaccgtaactcttcaaaaagtgtttaaaattagccaggtgttgggttatgcagcctgtagtcctggctactcaggaggataagaactgcctgggatcccttgagcccacaagggtgaagctgcagtgaactatgattgtgccattgcactccagcctaggtgacagagtgagaccctgtctgggaaaatttaaaaaaaaaaaaaaatggccagctgatgtcacatgcctaggcatgtgctcagcagtaaatgaaaggttctaaggggcattcaaatgcactattctgaggggcactgatttctattacatacaacattaataagaggaaattgtaaaaaataaaacattagatgggtatgtacgctattgtagtcccttaaaatgggacattccaatgatgctctcctgggcctcaccaggtcacctcaaagccagtaaaactctgcttcctggcggagtagaatttccagagaggtaaggcccagatctctgggagtccctttgcaatgggaccagcatcctagttccctggtcttaaccaaaagggtgtcctcaggaggcaagagtaagtttccaggaggcaggtaatttgtcttccccactgtggtcaccaagcagacagcccacacccagcgactctaccatagccaggctctgaaggagccagccccagggttggaatcttggctctgctacatcctccgaccccccagaatggtagttctcattagtggtactactatagccaatacactccatttccagcacagagctctggtgtgagtggtgccccccaccaggaaggaccttgcctgctgccactgaaggcagtgaggagagctgtggcagatgcaaaaacaaagtgtgcggcagtagaagagcaagtgaggaaggcttcctggaggaggcagcactttgagacttggggtttaacagacacatgagtggcaaaggcattctcacaaaatgagcaggtagacggagacgacgtgtgcaggtggcaggtgggattgtctggggcagccaaagcccagcccatgcatggaagacagctggacccgaggctgcagagaggaggggcagggtaggaggtatggagagcctggtgctaaggccagcttgcaggctggcctccgtgactggctggaaatagtgagtgggataagaaggaagggacaggagtgacctctcaacttattttcttccttggatccctgggtggtaggcatccacatggggaagccgagccaatttggaggagacaatgagatgaccaggacaggtaataacacggaggataatggcaatgccaacactgcagacaacatcagtctttccattgaatgaggcaaaatacaaaaagaggtcgggtgcagtggctcatgtcactaatcccagcactttgggactctgaggcaagagggtcgcttgaacctgggattttgagaccagcctgggcaacacagtgagacccccaactctacaaaaaatacaaaaatgttagctgggcatggtggctcatccttgtagttccagctattcaggaagctgaggcaggaggattgcctgagcccgggaggtcaaggctgcagtgagctatgatcgcaccactgcagtccagcctgggtgacaaaacaagaccctgtctcaaagaagaaaagcagaagaaggagaagaggaaggagaagacagagaggaagaggaaaaagaggaggaagaggaagagaaagaggaagggagagaggaaggatagaaaatcccaggtagtgtgaagatgtaaatgtggcaaaacaaaaaccataaaaccccaggtgaaaattggatgaacatttttataatcttggaatagggtggattcacaaaatatccttttttaaaaaaaaaagtgtaattcttttttataaggggtacaagtgcagttttgctccgtggatatatttcacagtggtgaagtctggccttttagtatagccatcaccccaagagtgtacataatacccgttaagtaatttctcatccttcactcctctttcacccttcagagtcttcaatgactactcttccacactctatgtccatgtgtctaaaatatcattctaaagtcacacctgctgcccaaaccatcaccatgacctgcccctcccttgggctaaaaacagctttgtcattaagactgctttattaagatgccaattctccctgggaggtgggatcacctgcagaagtggcttatgggctttctttccaatcctacaatgcacaggagaagcgacggggcttggcagaagacatcttggtttggaagtaaggaggagagctggggagaagacatgatccttggaaccccaaggagggacagcagctcccaagatttctgggttgcaggagggggatttctctgccactccctccccacgaggaacccagtcctgtgccctgcgttgtagatgataaaaagatcattacgagtcgatgtactacatgaataggttcagtgtctaggggtgaagggaaggcccagacttaaactcttctgaccaagttagtctaggaatcaaacatgtcctagccgagagagtcccgtggcatccaaaggactctgaaatccctccaccagccagattccctctttcatgagacttcatggaagttgcctgttgatgctagttcacattttaacgtcagatcacctagctgggtacaaaagggaatcagtagaacctagagaatgcaggtaaagtagccgttttctgctttattgctgtggttcagctcttaggctttgacaaaggtgatggcttctggggctgggtgcagcggctcacgcctgtaatcccagcactttgggaggctgaggtgggctaatcacttgaggtcaggagttcgagaccagcgtgaccaacgtggtgaaaccccatctctactaaaaatacaaaaattagctgggcatggtggctcatgcttgtaatccgagcactttgggaggtcgaggggggcagttcacttgagatcagaagttcgagagcagtctgaccaatatggcgaaaccccgtctctactaaaaatacaaaaattagctgggcatggtggtgggtgcctgtaatcctagcctctcgggaggctgaggcaggagaatcgcttgaacccaggaggcagtggttgcagtgagccaagatcatgccacttcactccagcctgggtaacagagtgagactccatccccctcaaataaaagaaaggtgagggcttctaaggccagacttcagccccaaatctctactggctgcctcttgggatatacagaaacctaatctccaataggcattccttgaagcaaaaaataccctattccttacttttttatttcattttaagggactttttttggttttaattttccaatgaacatggtttgcactaacatgataattgcactgaatatatatatatatatatatatatactgtttcttggtgtgattcccatgaataattcaacatgagaggtacgccttggaaaattatcacatgaaattcacagagagaagctagaaccaagttggagggtcagctgtctaacatcttgttatctgtccagaagtagccataaattcacgcaaaaagcaaaatctccggctcctgggagcagaagggtcgctggaagccaatcaggaggacatggctttatttaattgaggactaaatatctttgggattgttgtttgtctcccaaggacggtcactttgctgtaaaggcaatgtcagtgtttccctggtggttccattccctggttagacccggatttcctctctgcattacatattccatattataagggtacaatctgccaagccagtatttggattctcagcatcgtaccccatatcccggagcccatgttgcccccttccccgcctcagtcaggtactcagaggcccccactcattagccacagagtcacagagactcgcatggtattaagacagcaatatcatcttattggctattagcacaaatgtgccaataaacatagtgcataaaaattatacatattccctcagagtccataatcccgaactgatatggcataatgcaaaacacacttccccaaaagtagtgcttaaagtcacggtgtacaaattgaattttaaataaatttcctgaaacatcatcagtggttctggccacattagcaatacacatttgctaaaaataaagtgcagaatggctgtgcccagcccaaccccaaagggatgggaccagtgggcatttatttgccctcaagtggtttcagagttgggctggctgcacatgtgttcaggtgcagttgttacaacagcccaatagcttcccctcaagggtttcccctaattatcagtgatcatcaggttccaaaagtcagcttgtcttcacctcattctctatcaaagagggagatgttaattgcattatcgccttgccaacaccctctgaaatgatggcagtgatcattaacagcctaccacggagccaatcagagtcaatccaaattcagaaccagccaatggagtgcttcctaatcccacgtgtgtgtaaacactgaaaacataaaaacacaaggcagccattgtggagaatggggtgctgggggtgctgaagaccagatccgccatcaactccataaaatatttcactggttaatacaaacacacacagacacgcatacacatacacacacacacatgcacatgcacacaacgcagtgaaaagctagaagatccccacaagccttatgattttttcccccagccctctgcatcccagaccaagctaattgaccagcaaagaaattcaaagtaatgcccagttgtctggttttatttaatgaagaacctctccaagaatgctgtcagcatgtcacctttcacagataaataaatatttgtggttccttgcatgttagtttcagtagacaccaagaccaaaaataatttgcccttgttcacttgacttcctttcttaaatgtacaaagtaaggctgtggttttcctaagtgtgttctcgttcatggctcacctaagaagatgccctttggactgacctagaatccaactatcaaaatcctgctcaaaactactcaagccctggttcaaaccccaaccccccatatctcctttttcaaccccatccaaagagggatgagtcattgaatagttgatatctttctgctgttaagagcgctttcaaaaacttaatcctcaagggaaaagtgggcaaataaacaacgcacaagagaagaaatatacacacacaagagacgtatggaaatgtattcaaccgccaccataaaagaaattccaattttaaaaattttgatctatcaaacaaacaacttggcagagactacctcttatttggaaatctaggctgtcactctcccacaaagctcacagagccaaacttaccagggggacaaatatttcaaaataaaggggactcactacataggattttctcttctaggacttcaccttaaagaaatatccagagggcaccaagtgatcaatggttaaaaaaaaaaaaaaaaattggccacaacttcactagtaatgtgaaaaaatcagaagcaactcaatgtttgccaaaaaggaaatggtcaaacaatatgatgcatctgtcagaagacaaaactgcaactgacccttgaacaacatgggtttgaatttcttgggtccacttacattcagattttcttccacctcgccatccaagacagcaagaccaacccctcctcttcctcctcttcctcagcctactcaatgggaagatgatgaggatgaaaacctttgtgataatccatttccacttagtgaacagcaaatgcattttcttttccttatgacttttttaataacatttttgctctagctcactttattgtaagcatacagtatgtaaaacatgtaacattaaaaatatgtattaagtgattgtttctgttattggaaggagtccagtcagcagtaggtactagtagctaagttttagggaagtcaaaattatatgtagagtttcaaaggcacgatgggtgggtggagaagaatgggcatccctaacccccagggtattcaagagacaacagcacaacaaatgagtttaaagtgctcaattggctttatttgcaattctagaaccaggcaacactttattccaaaacacagaatgagtaatccagtgagccccgcagaatttgctttattgacagagaaggctgaagaaagcagaaacaaagaacaaagggaggattcgttacttttagacagaacaatagaaaaataactgattagttaatatcaggttactccaggcttccttttttgtgtgaggattaaagcagagggaacttcattatcatgcggattgaggactgaaacagacctgtttgggaaagtggctgttatctctctccggatttctgagaaggtcagataacaactgagtttagttttggtgacggggaactgaaacagatccaacacttccttagacagtgctttcggataaacatagatactaactcttctgctcttaaagcttatttattttttgttttgttttgtttttaaaattttatcttactttatgttctaggatacatgtgcagaaagtgtgggtttgttacatgattaaatatgtgccatggtggtttgcagcacctatcaacctgtcatctaggtattaaaccccacgtgcattagatatttgtcctgatgctctccctcccctcgccccggcaacaggccctggtgtgtgttgttcccctccctatgtccatattttctcattgttcaactccctcttataggtgagaacatgcggtgtttggttttctgttcctgtgttagtttgctgagagtggtgatttccagcttcatccatgtccctgcaaaggacatgttctcattcctttttatggctgcatagtattccatggtgtatatgtaccacattttctttatccagtctatcattgatgggcatttgggttggttccatgtctttgctattgtgaatagcgctgcaatgaacatatgtgtgcctgtatctttgtaaaataatgatttatattcctctgggtttctacctagtcatgggatttctgggtcaaatggtatttctggtcatttgtttaatctgaattccttcctcaggaaaacactcccagaccccacaaaaagtatgaaagaactgaaactcaccagatcaccacatccagacaaggagatgccagacccctcactcatcatgattgcctcctcaccattccccagttcctattttccaacacttgttacatttcttccctgctgcataagcctctaattttagacagccagggagaggaatttgagactgacctcccatctccatggctgcaacacccgattaaagccttctcccttggcaataattgttttctcagtaattggctttctatgtggtgagaagcagggcctagacagaacccctggtgttttggtaacagcatgttagaatgaggaactccattttgatttttagtctggtctgttgaagcctagtgcagaagcttagtcgaaaacaatagcctcctataacttttatttaacacatctataaaatgcaactctgtgaattcttaaaatcgaaccaaaaaaagtctgaaaaccatcaaggacatagaaaatgtttacaatatgttaagggggaggaaaaaaaagggcaggatataaaaactatatgtatagttgaatcccaattttgaaaaaatagtaagacatctaaatgcccacaggcctgtaaagaaatgcataaaaaatttaacaaggtttatctctggatagcgggattacaggcagtttttattttctgcttgaaacttccctgtatttctgaatgttcaaaaataaatttgtattactcctatattcaaaaagcaatgttttgcttttgttctttacaggctctgaacccccacagctcttgctgtcagaatgacttaccgcaaactgcacacgactccccagctctgcaagaactcgttctggcttctgctcctggctcagcctcctgaagcccaggaatcaaggcttctcctcccttgctcctcacccaaggtctatgggcttagctcttcttcttgttctttagatttaaggggtacatgtgcagatttgttacagggatatattgtgtgacgctgaggattggggtacaagtgattctgtcaccaaggtagtgagcatagcactgaataggtattttttcagcctttactccctccctcccctctagtaatcctcagttgtctgctttccatctttgtgtccatgagtacccaatgttcggctcccacttatgagtgagaacatatgacatttgcttttctgtttctgtgttaatttacctagaataatggcctccacctgcatccatgttgctgcaaaggacaggatttcattcttttttgtgactgtgtagtatttcatggtgtaaatgtgccacattttcttcatccaatccactgtggatgagcacctgggatggttccatgtcactgctattgtgaatagcactgcagtgaacatacatgagcaggttcctcttttgaattcagttccttatttttgatgtttgccctcaattgcccacactctgaccacttagctcataccaacaagccccagacaaggtgtcttgtttctgaggaattagagggcaggaatagggaaaggaagaaagaggaagtaaaaggtgtaagaaattctccttgctcatgatagaaagctgtagacccagcttgggcatgcgtttcattcacagggatttctttttagggggttatatatccagctttattttttattataatcttttttatttgtatgaatggatagggtgcgagtacaatcatgttacatgcatagattgtgcagtggtgaagtcagggctttagagcatccatcctctaaataacatgcatagtacccaatgagtaatttctcattatccacctcccgtccaccccacccccttctgagtctccatcgtctaccattccacgctctacatccacgtgtacacattatttagctcccacatatcagtgagaacacgcaatatctgtttttctgtttctggcctgtttcacttaaggtgacgacctccagttccatccatattgctgcaaaagacatgatttttttatggcttaatagtattccattgtgtatatgtaccatattttttccacccatttgttgatgaacacttaggttaagcagtactacaataaacatacaaatgcaggtatcttttttgtataatgatttcattttacagaaatttcttgataattagttgtcataagagtgagggatggggtgatactgtggcctgcagttccatctgtgagcctctgccttgggtggcctgaaaaagatgaggattttcaggccaggtgtggtggctcacaactgtaatcccagcactttgggaggccagggcaggtggattacctgaggtcgggagttcaagaccatcctggccaacatggtgaaacctcatctctactaaaaatacaaaaattagccaggtgtggtggcaggcaccgtaaacccagctacttgggaagtcaaggcgggagaatcacttgaatccaggaggtggaggttgcaatgagatgagatcacgccactgcactccagcctaggagacagagtgagactctgtcaaaaaaaaataataaaataagaaggaggaggaagaggaggaggaggagaaggaggagaagaagaagacagggattttcttctttccattgggacctcagctcccaggtgggctgatgatcacatcaccaaaccaaacgtaattccagcaatggacagagatacagaattctgttccgatactacagtaaaatgagctatgttggacttagggtcatcgtctcatacaatactttcccaacaggctggcaagggaacagtggctttttcctggttttactttgcacactaccttggatcctacccctgagtaccctatgaatgtgccattttgtttggtcctgaagtgtgtactttccccatcctgtcagtttcctgggaagactgtcagtgcccctgatgccctgcgcctccctcacaattttcctgccattctcccaccctggccagcagtgggagcatgccccaagcagcaggggggtcgtcccaccatcatagctattgccggcctgagatgatagatgccactgtggaagggacagaagagcttccatctaaccgctcctactgacctcaccatcagtgatgcagatgtacttgtcacatcataaacacttggcacccattggctcttccccaaatggctatcagaattgcagtttcagccaccagcagctctccgatgggcacaggctccacttatggctggtttggaatggcaaatccatcactctctttgcctgtaaaatgccaaggagactgatctaagcagggggttcccatccatggcctgctctaggcctgaaggaacacagatggcatttgcaggaagatgacatctcaccatccccatctgagcaaagcctgcccatcaaacaaccaaaggatagccagtcccctgcacagtgtaaagtgacttgcagtgatcctcttccccaaggccagccccagctctcagacctccagtcccaacaagtctttttttgcaaaggaggctcaccctggaacatggctctcccaaggggagacaggaacggatgttgacttcatcccagcagcttctgacacaatgccactatctttcaactttctccaccaacagggtcaggctgttgattggcctcgactgcagttagcctgacacggctagcagcctcaaaacaaattaaacgaggcagggatgccgtgcagtgatcgttccattatgtcccctctgcttccacacgtgactcacactatcacttttagaaggtgaagcatcttattgaatcaacacctaatctgcacacagtgtcacggaggaggggcgaggggacagcgggagcattttctctgatccttttctttcctgaagacttcgctggagacaggctgggtgggggcgaagatgaattgtgaggaaccctgaccctatttcaggtaagcttctgatttactgttcattgtgctttctaacgaataatttttatataataatgccaccagtaagcaccaaacccttcttcttgggaatgcaattaagggaaaaaatagcaataaattgttttcagtacttaacccagctccaaatttatggctgctgaaatttattgtttcaggggcctgaaaaaatggcgattaattttattccatttcctgccattcaccctcaaaactgaaatataaataaggagctgttctcggcctcgggttttcctgcctgttagaaccctcaaaactacagctctccagacagctacctctgaaggctcctgaagcttagaaacagagaggaaaacacccctttatctgcacgtgtctccaccactgcaattgctggaagctccacgagtgccctcggtgcacagatgtgctttacaacagagtgactgtaaatgagaaaacactaagttaggctctgacggccaatgctggatgtatccgtttgccctataaataagcactgatcacctccattttattgaactcattttctaggcaagcaaagaccacaagattcttctgcacattttctctttacaccctctagtactgctgctactgtcagctccgacagatttatagcccattcattcatgggaacaaaaaccctgccacggctggtcatgggacacgcaatagcagttagttcaaaagataacagctgcaatacctcacctctccattcagcactacagagccagcactacttcggaggtaataaatgcttcttgttagtgtgctttgagtcataatcctggaataactgtggtcggccttaccccgggccccgcccctagggaaaccgctttctgccactccccaacacccaccccgcaccttcactccagcccctttctgccagaaaagaggggagtggggggttgaaggcagcccactgcgtaaccaaaaagtggaccctgtctcctttttccagtccacccaacacaagctgggttgctgaacctttgcaactcaagcacttaggcaacgctgaaaagccgagcttcctcgtggtaagtggcaatgtgggtatatacattctccttgcaaactgatcagaaacagagctcgggcatgagtcctgtcccgacaagaagaggcagctggtctgactagtccaccaccatcctcagagcctggacacacacaacaagcatgtattaaaagaatccatggattttttttttaagtagtgaatgacctggggaggaatagaggatcggttccaccccgctcactcagagcaggaaaaggtttaatgcaagaagcaatatagtggtgaagcgttctgcctcattttgaagtcggcctttcccacccacaggcctcagtttactcatcttaaaatggggatgttaactgtaccgattctaccaacaaatcagggatttgttgctagaattaaacataaaaagtaaatacctttaaaaatttatcacaatgctaaccaagtagtatgcgttatcaaataaattaattagtttagttggagaaatcagatatgcacacaagaaacttaaaggaagatcactagaagacaaggtcattgacgatcaaactttagggaaatgtcttccatttttgaaaccctccaacaagacacatacacctgcccccacctctacctccaccagcgctctgtggcctatattttgcagagatgtgttattgtcactgttagtctgatgtcccgacaattaaactgcaaagagaaaaaggccagtcatgcagaaatccaacagcctggcctctgggatccgcccaccctagcaatgggtccaggtgggagatgggtcatggagatatggctggcccaggtcaggcagttgaaatggaagttgagagcctccaggctccagaaggcaccagagagagaagcaaagtcaaactccccatgaagacacacagttcagtggggaaagagtagactgtgaaacgcatagaaaaagacactgggcattagttgctatcagtacattcctccctaatcaatcagctttattgtgacgcctctagctcggctcataaggcctcagctcataaggccggaaagccgcttcggcagcagtttaaaatgtttccagtttaataatccctgctaattgaaagcagctcagaaaagcggggaagatgggggttggaagcaaaccagcaccgtttatggcaacagtgctgttcctaggggaaacaaaataacctttgatgctgcagggggaacctgcctccccgtccccaaacaaactaattcccacaactgtcttctttggcacgagagctgtttcttcttacgttttaattgtataatgttatagcagccgaattgctgtgaaatctgtttttaatctgtggccccctgctgcaaaaactggattattttttcttcaacagagaattacattcatttttataattgttctttcctttcaaatcacctaatatgacaaatgctggacaaccttacagctcatctgctgaagagtgtctttatgagttgaggcttcaatgctttcatggagaaattgcctgatttaagtaaatcatgtcactttcacccttgcaatcgtatttgtttcagacgtctgctgacctaacctgcagagcaaaaacaaaacacgtttacatttctaggctgagatatttagttcaaacgatgtacaaataggtcataatgaaaagtaattttagtacacggcaaaggtatcatttaagtatacttttgacagtttttacacatacataattattccagtattgtaatttaaatggataaaagacagatcttagcacaaaagcctccatcctggtttctcggaattccctggcagagctacagttggggacatggatatagaagaaggatgtcatgtgtctgatgtaccatgaatcagctgggctcaaccttcaccctttggatccatgcaaacctaccctagaaggtggatccagacacctagatcttttttttttttttttggtattttctttttatttttgtgaatacacagcaggtgtatatgtttatggggtatatgagatattttggtataggcatgtaatgcataataatcacataatggaaaacccatcccctcaagtatttatcctttgtgttacaagcaatccaattatacgcttttagttatttttaaatgtacaattaaattattattgataggtcggacaaacacagcctgggtgacctggtcctgctgtgtccccacccaaatctcatcttgaattgtagttcccataattcccacatgttatgggagggacccactgggagataattgaatcatggaggggttcccttttagtgttctcatggtagtgaataagtctcacaagatctgatggttgtatgaggggaaacccctttcgtttggctctcattctcttctctcttgtctgctgccatgtaagatgtgcctttcaccttccaccatgattgtgaagtctccccagccatgtggaactgtgagtccattaaacctttttttccttataaattgcgcagtctcgggtacgtctttacgagcagtgtgaaaacagactaatacaccaagcatccacctgcggccacaagaggatggctttgtattgagagacatgatatgtaagtagcaacagaagtgtaaatctgagtattcctcctcccctccagaaagacttgaaacatggaactggagggcactgagttttttagggtgattgccagatgtgttgattagtgaattaaacaaggctgcattcacaggaaggcaatgtccgacactgagaggtgcccccccgtctgggctggagtagttccttttgcagggaaacaaaccagctgaagtatgcctgggaaggaggaaacaggacagttttccaagtgtcatagctgaacaacaggggaagaaactggagaagagagaactctaggaaataggctttctgtctacaaatccccctggttaaccattccagagcccttgctgcctactggaactgagatgagagctttgcacaagatcttcctcatgcctcactgcattgtcagttgaagataagcaggaccatggtcctcgggtgacagatgagaaactgagactttgggagggccaatgactcacccaggatcatctgctatgacatgatggagcaagagttcatacccagcatcttgttttgattctccaatctcacctaaggtcaggagttcaagaccatcctggccaacaaggtgaaaccccacctctactaaaaatacaaaaatcagctggatgtgatggctcatgcctgtaatcctggctactcaggaggcggaggcaggagaatcacttaaacccaggtggtggaggttgcagtgagccaagatcacaccactgcattccagcctagatgacagtgactccgtctcaaaaaaaaaacaaaagaaaattactcaggagacacagccagtgagaacaaaacgggaattatttttaaaatttaatagagccaggatcttgctatgctgcccaggctggtctcgaactcccacgctcatgcaatccacctacctcagcctcccaaagtgctgggattacagatatgagccaccacgacaggccaaaatcagaatttttataccagataatttgactccataacttgtggtgccagccactgtgctgtgctgctgcttctgtgtgtatatttatgaaccagtttgtcttgaggaattaagaacccaggtgtgccattcattgtgcgtagcaagaagcttgatgctgttttatcactgaatcatcccaacaatccaatgaagttgaaatgtttgtcccacatatcagaggggatattgaagcacagaaacttgaccagaccctactgctaataaactcagaaccgggatctgcctgagtccctctgttctcctgaggatgaagatctgctgtctaaggatgttcaccaaggcaggtcttaggcttagaaggcgacccagccccatctggagcctccttcccagccaagtctggcctgcagtcatttgtctccatcaggcacagccattgttctccaaacttcctggatccctcttcctgaaacaaaaaccttcagttccaaggaagccctcactttggagagaacaggaaggcacagtttcatctttggcacttctcaggcaatacttcctcactgtccaagggcaaaaataaggtggatatagcccaaaaaagggacatagtgctctgagaatttagcttggcttggagaagcctgggaatatgtatgcatacacacatacacatgcacacacacacacaaatacacacaaatgcacacacacacacagagtttcctatgttccaaaacaaaccaaactttatgctttcacctggtaccctgcagccctggagttttctcactttcaacctcagacccaaagaggaacaaagagaaagggaaagaaaatgcctttgggttgagtccatttgaccctgatccatccagaggaggtaatgagggcatgacaagttagtggccagacagggacaatgatggcacctaattctctacatagagccaccctctattcagggaactctctgctagtccttttttttgttttttagacagtctcgctctgttgcccaggctggagtgcagtgacgctatctcagctcactgcaacctctgcctcctgggttgaagcaattctcctgccacagcctggggactacaggcacccgccaccatgcctggctaattttttttttagtagagatgaggtttcaccatgttgaccaagctggtctcgaactcctgacctcaggtggtccacttgccttggcctcccaaaatgttgggattacaggcatgagccaccatgcctggcctctgtacaagttttgaagcttagtttctctgttatacactatcaaaacactgggagcacacacacattctagaaggttgatatcattaaatacctctcttcttctgtcatggtggcaaaaagagaaggaagacatgcttcccttttacttggggctgccataacaaacaagaaacaggtgctcttcaacacaggggaaattccctgcttgaggagcctctggttgtgggtcacagaagctaaatttggggccaggtatggtgaagcattcctgtagtcccggctacttgtgaggctgaggaaggaggatcacttgaggcaagaatttgaggctgcagtaagcagttatccagcctgagggacagagcaagactgtctcaaaaaaataaaatggagtgttacaaaataagtaaataaaaattagttttaggctgggcatggtggctcacatctgtaatctcagcactttgggaagccaaggtgggcagatcacttgaagtcaggagttctagaccagcctggccaaaatgatgaaaccccatctctaccaaaaaaatacaaaaattagccaggtgtggtgatgcacccctgtagtcccaggtactcaggaggctgaggcaggagaatctcttgaacccgggaggcagaggttgcagtgagccaagattgcaccactgcactccagcctgggtgacagagtgagaccctgtataaaaaaaaagaaaaaatatttaagagttttaataaaataagttaacttggcaaaggaaagcaactgccaatctacacttttccctaccctctttgactgggcctgaaatatctacataggcatgccacactctctctcagaaccccctactggataaccctatgacctcccccatgtgggagagaaaaaacagagaaatcacaagacaggtggaaatatgtagccattcaagatgcatacataaatctgcacaattagagcaaacatcacattatatggcagagttagtgcaagaaacaggagacaagtgcaaagatgctctaggtgtgtccttccgagacatttcaactacaaaactctggcaggtagtataaaagagaaaaatctaaaaatattgcttttggatcgagaaatatgattgacaaatttttaaatggagaattagaagacaagctcaagagatagtaccaggactcaaagataaatgcaaatgagaaagaaataagaaatagcaggcgaggcgggcggatcacgaggtcaggagatcgagaccatcctggctaacatggtaaaaccccatctctactaaaaacacaaaaaattagccgggcgtggcggtgggtgcctgtagtcccagctactcgggaggctgaggcaggagtatggcatgaaccagggaggaggaacttgcagtgagctgagatcgcaccactacagtccagcctgggcgacagagcaacactccgtctcaaaaagaaaagaaaaaagaaacagcaggcacttatcctggatataacagtggtttaaaaggaaagaaaagaagagtggaaaagcaataattaaaaggaaaacagaaatcttccttagggcacatgaatagggacgtcttcaaggtagaaaaggatctctgggaacaaaatccttacccagaaggaactgatacaggctatgcttcaatttcacacaaaaagacaaaagccctgtaagtaactaagcacaaaatgtaaatgagctggaagcttctattaaaagacttagtttgggtcaaaaacaaaatccagctttgagctattacagaggaacaaacctataataaaatgttccgaaaagctttaaaaatttatgcatttattcattcaacaaataaatattgagttttttccatgtgccaaataaagtgatgggcaacgacttaccaggcaaacacaaacaaaaataaatcagagacgataatattaatatttaacaaggtagagattaaagcaaaatggtcaaagtgaacatttttctcttgatctttgccaggtataccgagagaaaaaaagaagatttaaccaatattattaacaaaattgaatatatatatggtatatttacacatatatacatacacgtatacaaaccatatacccaaaggtctaatacagtatttgaacaaaatacatttgaatagtattattaataaacttgaatacacacactcacacacatacaaacatttcaaacctatactcaaaagtctaatatagtagccactaaccatgagtggctatttaaatttagattttaactaattaaaattaaataaagtaaataatcagttcttcagacccactagccatgttttctgagtctagtgggtactccaccagtcagggcgggtatataacatttctattgttgcagacagttctgctggacagtgctgcatacacaaggcagtttttaaaatgctacatagcatctacaaagtgttcctgtaatataacatgcacaaaagaaggataaactttttaaaaatttaattgagattagtaaataaaaatcaggatcttagcacaagacgtgctcattgttactagcgtgtcattgtttctaggacctctcagcagacagagctgggaaatacatgcacatgtacacacacattaaataggcattaatatttatttctgtatctatagatgatggtagatgatagatagatagatagatagatagatagatagatagatagatagatgatagatagatattaaaaaccatgagttcatctgccccttttgattccaattcagcacaacaaggtacatttcttttttttttttttttgagacggagtctcactattgtcacccaggctgaagagcagtggtgcaatctcggctcaatgatggaacctccgccttcttggttcgagcgattctcccatcttagcctctggagcagtgggactacaggcatgtgccaccatgcctggctaacactggctacatttctaacctcctcctctgcatgtttccccaatagtgagaaacccagttcccattatcctcaatacatggattcacttgctcatcctagaagtcacagaaggtgggttcaaaattccaacccattaccattgcaggaaggaaaccaactggaagcaacaccaatgaggaatccgtatttgtttaccactggttggttggtcagttagttggttggttaattggttggttctgcgtagggctccttggagaaataactgaactggggcagggaaaatccaagatgaccctgaaacagctttctgtgtcagaaattaaggaagcgctcaaagacttataaggatttgtcaaaaggagacaagaaccagattgaaggaatctcaactgccaaatctaggacaatttgaacatcaaaatatatccttagaggcagaaggatcacttgaggccaggagtacgtatgagaccaggctgggcaacacagcaagaccccattaccacacaaaaatttttttttaattagccaggcatagtggaacataccagtagtcccaactactcaggaggccgaggtggcagggtggcttgaatctgagagtttgaggctgcagtgagctatgatcacaccactgcactccagcctgggtgatagagtgagaccctgtttctaaaaaaatatatttttaatgtaatgatggtaatgtgttataacccattgaataaattaagagttcatgcatccatactgatataaataagtaatttttttttaaattaagtaagtggggagaaaaagctcttccctacagtacaatgctcattgataatatagaatgaacgctgaggttataaaaccatcagtgtatagtaaaactagtgggtgggaatttgatgaagaatatttacacagtgcaaaagtatctctccacaattaattactagttacaaaggagaagatagtaactttacagtggaggagccagctaggcaccaccttaaccaagtgatcaaagttagcagcaccgatattggaagaaaccaagttctgtgcctcttcataagatgcactcagaaaggcacgatgtcacttgtgggtattcctgttagaagtgcataaaccgaatctataaatgaagagtcatgaaatacacccaattgagtaactgttccagattaacgatggctaaagagacaggacaactgaatgcaactcttgatcctggaccagatactgcaagggaaaaaataataactagaaaggacaatattgggacaattgacaaaatttgaaaatggattatgcttgttttgaataatggactgggagaatctccaagtttctctttcctctgaaacaaatggcacagggattgtccatgccttgatgtttggaagaaattagccttaaaattttaatctagtgtcttgtttcggaagcagtcctttgacagtctttccagttcttctatgtttattagtagtagtatctttagatttttcaatatttcttttgttgacagttttggtaatccatatatttccaagaaacttgcaaatttagttaatagtaccatatcaatgtcaaatttcctgatttgggtaactgagctgtggttatgtaagagaatgccctctgtttattagtagtggtatctttagatttttcaatactacttttgttgacagttttggtaatggtaatccacatatttccaagaaatgtgtaaatttaggaaacagtgccatatcaatgtcaaatttcctgatttgggtaactgagctgtggttacataagcgatatactctctgtttactagcagtagtatctctagatttttcaatatctgttttcttgacaattttggtaatgcatatatttccaagaaatttgcaaatttagataatagtaccatatcaatgttaaatttcctgatttgggtaacagctgtggttacgtaggagaatgccctcattcttaggaaatagcaatgaagtatttaggggtaaaggggaatgatgcttccagtctattctcaaatggtttagaaggaatattagtatacatattaatgtatactaaatattagtatgtgcatattaattaatatatgtacagaaagaaagagaacacaaatggggcaaatttacacaattgatgaaggatatgtgggagttcataaactattcctataacttttaagtaagatggaaataatgacaataaaaagttaccaaaaattttaaaattattgacagtttttgatttttttaagtcgaactactgaataaattcaaggatgagtttctcaaaacaagtccctgtcaagtctaatcaagaagataaaagaaaaaaataatctctgctgtggcaggatggtgtcatccttataaaagagtatgataactccataacaatactttttaagtaaattccagactttatttagatgtcacccacttttcaactaacgtcctttctctgaaccagaatcttatccaagatgccccatttcatttagtcaccgtgtctcctcagtctcctctgatctgcgacagtttctcagtcctgctttgtttgtcatggccttggcagtttagacgaatactggcctggtattgtgaagaatgtccctcaatttcacaccttcagtttttaaaatctgaataagatttgcaaatttcttggaaacatatgggttaccaaaactgtcaataaaagaaatatttaaaaatctaaggacaataatactactaataataaacatagaagaactggaaagactgtcaaaggaccgattccaaaaacaagacactagattaaagttttaagggcaatttcttccaaatgtcaaggaatgaacaatccctgtgccatttgtttcagagaaaagagaaagttggagattctcccagtccattgttcaaagcaaacataatcttgtcatccaaacttcccaaagatataacaaaaaataaaacctatgaactaaactcatttgtgaatatagacataaacatcccaaataaaatattacaactcagatccaacaagattaagattttcttgcccatatgcaaaatacctcaacattaaaaacatctattaactataattcatttcatcagaaagtcaaagaaggaaaatcacagtcatcttgattgatgctgaaaggtatgaattcaatatctcctcctgatgaaaactcactaaatttagaagcatctgatctcaaaacaatacaaaatagctacctcgaaccacagacattgtcacacatgacagcaaaaaaccagcatcatttccattcaagtcagcaatgggacaagggtatctattatcaccattgacaatattcagcctgttctaggcaattcaatataacaaagataaaaaacaaaatgtgtgactattggaaagataggatttttttttttttttttttttttttttgctatttctcaatatgcttgttgacctagaaaacccaagagaattaactagaaataaaaattagaaaattcaagaaagcacagtctggtggcaatttacagagtaaagataatagatgataggtagataatagatagaaagatagatacatagatacatagatagataagatgctttcctatttattcacaatggccagtgaaaactaaccataattaataatgcaaaataatatcatccacaaaacaactggaaatctgaatgcacagaatactaaacatgaaaggtcatagattcctattagaaaaaccaaaaattaacagtcttcaaagaagatctgggtgaatggaaagatatatcacattctgataatactatagactttttcaattactttacaaataaattgcgatttcagtcaaaatccttgtaggagaaaaacattcataacatttttaaaaaaacaaaataggtattagaagaggcttaccctaccatatattaaaataaattacagaaccatgctgttaagacaatatggaacccactcagaaaagacagatgtaaaagaacataaataaaaatttatctgagaaaaaataatcaaagaatatactaaaaatatattgagtccatttattattaaagaaatgtaactcaatacaaaataacattttttggctttcaaatgcaccaacagtggaaaagagtataaaatacaattgctgatgaagaagtaggaaactatacacttccatacactatggatatgagggcaaatttctataacctttttggaaagcaacttggaaacatgtaagaaaaactttaaaatgtggcataaactttgatttaggaattttatgtttaaaattagaagcagttttgttttcttgtgatgtccttgtctggctttggtatcagggtaaagttggcctcgttaaaagagtttggaagtattttctcctcttcaatttttttggaagagtttttggagaattggtattagttctttaaatgttgggcagaattcaaccatgaagccatctggtcctgggcttttctttgttggttgacttttttatgactgcttcaatctcctccctcgttattggtctgatcagatttttctatttcttcatgatttcaggtcggtgtgttgtatgtctctaggaatgtatccattgcttctaagttaaccaattttttggcatataattttttttttggagacaggctggagtgcagtgtcacccaggctggagtgcagtggtgcaatcatggctcattgtagcctcaacttcctgggctcaagccttgaactacagatgtgtgccaccatatccagctaatcatttttttaataatttttttttttttgtagaggcagaatctcactgttacccaggctggccttgaactcctgagctcaaatgatcctcccaccacagcctaacgaagtgctgggattacaggcatgaatcaccatacccagccagcatataattattctaaatagcctcttatggtcctttgtatttctgtggtgtcccttgtaatgtctcctcttttatttctgctctctttctcttggttagtcaagctaaagtttggtcaaccttgtttatcttttcaaaaaactaacccttatttttattgcttttgtattgttttctagtctctatctcatttatttcagctctaatattatttcttcagctgctaacattgggcttagtttgtttttccttttctatttccttgaggcataacaataagttgcttatttgcaactcttcttttttgatgtaggcatttattgttatacactttcctcttagaactgctttggctgcatcccataagttttggtatgttgtatttccctttttgtttctttcaagatatttttaaatttctcttttaatttcaccattgacccgatggtcgttcaggggcatgctatttaattcccatgtatttgtgaattttctgaaattcctcttataaccaatttctagttttataacactgtggtcagaaaagatacttgacatgatttcaaccttcttaaatttggtaagatttgtcttgtggcataacgtctgatctatcctggagaatgctctatacgcacttgagaagaatgtggattctgttgctattggatgaaatgctccatatatttctgttagatccacttggtctaaagtgccttagtaattttctgtctggataatttgtccattattgaaagcggtctactgaagtcccctactattatcatattgcaatctatctctcccttcagattctttaatatgtgctttatatatttgggtgctccaccattgatgaatggataaagaaaatgtggcatatatacatgatggaatagtattcaaccttaaaaaaaacattctgtcatttgcaacaacatggatagaatggcagaacattacattaagtgaaataagccgaatatagtaaggcaaatactgtgtgttctcacttatacgtggattctgaaacaattgaactcatagaagcagagagtagaatggtggttaccagaggctggggctgtggggaatggggagatgatagtcacagagtacaaagcctcagctagacaagagaaagagatttggttttttatatcaattgaacatcatggtaaatatagctaataattgagctctgcgcatttcaatataactaaaagagtacatttccaatattcttatcataaaaaatgttaaatatttgagatgatagatatgttaattaacttaatttactctttccaccgtgtattcaaaaatcataacaccactttgtaacccaagaaatacatacaactgtaatctgtcaatatataacaaaaatattttttttaataaaataaaattagaagaaaccatccacttgacctcatggaatactatgcaatcatttaaaattgcatccttgaaagatatactattaagtggagagatgagcagcatacattaagtgaaaatgcatgttagtgattttgcataggagaatcccaggtttataaaggagcaggcatccagagaagatggttagtataaacagagactcagaaggacaggcccatctgtttccctgtaggtgtagtgtctcggtcatcagtcagccatgttgctgttaatcttcccctccttaccttctttttattttattttttttttttttgagatggagtcttgctctgtcacccgggctggagtgcagtggcatgatctcggctcactgccacctccaccaccaaggtttaaatgattcttctgcctcaatctccttagtagctgggaccacaggtgtgcaccaccacacccagctaatttttgtatttttgtagagacgtggttttgccatgttggccaggcttgtctcaaacgcctgacctcaggtgatctgcctgcctcagcctcccaaagtgctgggattacaggtgtgagccaccacacctgacccctccttagctttatcccttgcattagagggtcagcttctggacggaagggttgttattcattcactcactcattcattaattcactatgtgagtcaggcatggaagtaaacaaagaccacccaaatgagaacaagcaaaggctatttatttagagcttgctatgtcaagagagtcagcaaccatcactcacatttggcagagactcacagggaggcagagaggtgggaaaagtttacagtggaaaaagagaaggcttccagtgtgccccgttagtgggggaagctgtaggcagctaactagaagcagggcatcctatgtgatggtttaagtgggcatatttggctttctccatgtgaagctaagttagaagcagggacaaaaattagggacactgtccctaattcaacaagtcccagccatttaagaccaaatgttacaagggttgttatttgtcatcctggatggttgctaaagatgggagtttgacttcttaaattctttgctgccgatcgtaggtcagagttctatcttatatatggtctggttattgcccgtatattttgtctcttgtaagcactgggaaaaacaatgacttagaaaggtacctgaaacccattgcttgccctcagggagattatgatcaaacagaaaagacatcctattattttggaacgtcctggtgacttgttcatgttcaacagtagggcttctacctggcactacgaaagcacattggacttgagctaaaagccacaccccagcaccatggcctgcaagacccctgaggacttggctcttacaagccccttttatgtcatttctcactactcctcccctcacttgcacctctgcaggtcgcgctggtggtcctgccggggaaaaaccaccccttagatgcaaggagtgagggtattcaatgcctacggagcatttttatctccatgtgccagcaattctaagcaatgtgcatgatttaaaaaagaaatactcctttcaaatctattgttggtttaggttctatacaacgactcccattactttgtgttttagtaatatagatgcaagcttcaaattagcacatttttattacttacattttaatacacattgatttctacatggaacttaattcaaataactcctagttatagatgtgttcctgagacacacacactcaactatacgcatttatttaaagagtaaatttatagcagctcagaattgctgaagttcactttgggcacagtccctgtccccaagctgtgtggaactacacatccctgcatttaaacagtaggttcaaaacaaacaatgctagcacagtgattgcaaaggcaaagaaacagaactgagatgacttcaagtctgtcatcccaagtgatcgtgtggaagttcattcatgtttaaaatttaaaacagaaggaactaaacagtgttacctttttgtttgataagcgcaaattttagttcacgcatgatttattgaattttaatagggtcttcaagattgaaatttgttagtttcaatcgttaattgaaaactaaaagagaatcaaaaaagttaaattgtacagcaatggagccatttagtactttttatcctggtgtgatgtgatcaatgaggttaatcagtcacaaaaaatatttgcaaacaaccagaatctcccttgaacaatgtccagtgaagcttcaagctttaaaactgttccttgaagatccatgctcagaaatggtggagaaagtcagggcgcagtggctcacacctgtaatcttggcactttgggaggccaaggcagggggatcacctgaggtcagaagttcaagatcagcctggccaacatggtgaaacctcgtctcactaaaaacacaaaaattagtcaggtgtggtggtgagatcctgtgatcccagctactcaggaggctgaggtaggagaacctcttgaacctgggagatggatgttgcagtgagctaagatcgtgccactgcactccagcctggacgacagagcaagactccatctcaaaaaaaaaagaaagaaagaaatggtgaaggccattaacaatgcagcacacaaatacaaaaaaaaaagaaaatgaaatagaaaaagaatcaaattttgagaaatagtgcaaggagaaacgacaaaagacacgagtctaacattgccagaagaaattgagagagcaaagcttcaaagccttgatcattttcaccaaagactggacacatggcccacagcaatggaactggtcatgtcatgctcatcatcatcccaccgttcttcctgatttttgtaaaagaagaaaaaccttgaaagtttttactgaataaaataggaatctatgatgaatctctggtgatgatattttagtggttttcaactaggggagatattttagatgggatttttatacatctctgccaaaattatcctcacgtttaagactttcataaccatttgtatgtctgttgtttcttgtgaaagaaactctttgaaattaaaactaataaagaagtattcttcaaccaactatgagtgaagacaagctgacaaatctggctgttgtgaacagtgaacatgtatagatgaaaaaggttgtcaaagccactggcaaatttgccgaagtcgaggctcaaagtgagaactatgatgtcattattcactgttgcaacagatatatgggaataagtttgtccacatggacgtaatttaataggattaatctattatgtatttttctttttgctatcgtaatttttcttctggcatgattagatataaaaagttcaataaaaggacttttttgctgtctacatttcttttctggtcattactactattactttcattgctgaattgttcttgaaaattattctggcatatagaggaaagagggtgttggaataatcccctctatgtctcaaatgcaccaggctcactctgcttccagtgcctcttgggacacatcaagctcttgtccaactctaagcctttgaacctgttattctccctgcctggagcaccttccttccagatcgtcaaggaactagactcttcccccactcaatattactctcagagggtgtctcagtctgttttctgctgctttaatagaataccacagactgggtaattaataagtttatttatcgtggttctggaggctgggaagttcaagagcatggcttcagcatctgccaagaacctttgtgctgcatgatcacatggcgggagggcaaagaagcacatgagacagagaaaaatgggggctgagtttcatcctttgatcaggagcccactccacaataactaacaagataacaggattaatcaattcaggatcaatcaattcagaattaagcaattcaggattaatcaattcatgaaggcacagccctcatgacctaatctcctcttaaagggccccacatcttaatattgtcacaattacaattaaattttggcataaggccaggcatggtggctcatacctataatcccagcactttgggaggctgaggcaggaggatgacttcaagctgggagttggagaccagcctgagtaacacagcaaggccctgtctctacaaaaaaaaattaaaataaaaattagaaacattaaccaggctatttttttacagtagctgcagtcccagctactctggaggctgaggcaagaggatcgtttgaccccaggaagttgaggctgcagtgagctatgatcgcaccactgcactccagactggatgacagagcatagatcttgtctcaaaaaatcaataagcaaaataaacagatttcaacatgagtttcagaggggacaaccacagcagagacgttttgcccagccgttttcacaatgtgcctgcttccccagtgcaaatctcaaagtcttgcatgaccctcttttttacttgcctgttcgttgtctgtgtcttgctacaggcatggaaaccccggggagggcggcttgtgccaccctgtttccccatctccccacagcacagcacctggcatgcaagaggcccacaggaaatatctgtggcatcgacccgtgagctcagaggagaagcacctggcctggaggggacaggtgagcggggtcggatctgccaagtgcaggcccctgaggcaagagccagagggaggcggagggagggctttcagggaattgcaagtggacagcatgtctggaggacactgttgtggctttgaaagaacagggaccttgaaatggtcatcgtaacccagggtagactgatgagggattttcggaggctgggcttttatgcccaagaaaataaggaggtgttttaagcaagggagtgacatgatctgatttgccctctggaaatatcactgtggcagggagagagaaaggaatggaggggcaagaatgggaagggaaggggaacatggcgaagggctgtgctctttagagcttccagaaaagaacaggggctgagatgcagactaagacgaccccttgctgctaatttcccctccaccctgcaccccaagagctaagatttctgccagtcctgggggaagtccttcgaggagggggacaggaaaagcaggagaccagactgccacaacaggcagggggcaggcgctggcaggcagcacagatgggtttctggaaggacactggtgctggatacagggggctcctaaccaagctgcctgtggggaacagagactgagaggagctacaggggataggatagaggcagaactcgcatgcttccagtcactctcctcactcacaggggagcccagggtcaggggaggccacagggcggtctctgaggactgacacaaatacagaatttctaggaaagaaccactgaaagatgagtgtccactgattttcctttgtcaaaatccagtttggcaacgaagcggctgcaaagagtgccccagccggaacccccagtatccatgcccagttcccaccctggggcacccaggtacgactggggctggcggatgcacaggaaccccctcctccccctcccacactggtggccaggaccggccttgtccccgactcagctgctgatgtgggaactctcctgggacccggagcaaggggcacgctttgaatctttacatgccacaaggaagaaaatcaatttcaatgcccaaaggagggaattactgcagcagaaggtcaccaaccactacaagttgtagtattgtcttggagacttggacggggggaaaatgcctccaagtgaggtaagagtgctctgaggtctgaagcaaacccttctccccaggaataatatgagatggtcctgggagggggacaagaccacacaaaggaagaaatttctttgtgtatgtacaactggggtgagattctgaattctggttctggccacttaggcaaggcctcaactgtagctgcagagctctgactcatgttaagtcttggaggaatggctgatattttaacagtattgtcacagtagcagccacaccagtggcaatggccactccacttaggcatggcagacacattccacagcccagcctccaggccctagagctccccagttaatgccaggttccctaagcactgatgcaaggatgctagatgttggatatttatttatgttccatctggctcccaagatgaaacataaattaaagcgctggctcacacttgtaatctcagccctttgggaggctgaggcaggaggatggctttaggccaggagttagagagcaacctggccaaaaaaaatgagaactttagatgtcacttattccatctctgctccattacagcaaagatggaaagaccctacccatgcccaggtaccttgtctttccttggggccagtgcagcggagcccagtcaaagcaaaggtcaaatgacaggtccattaggctggacatttacaatcccatttctgggtgtatagactataaggcagctgggacccaccttcttatccaggcaatgcaaagatgagcagagggtcactcaatgtcctgggattcaagagaaaaaagatgttgcaggttcagggaagccgctacttcctggactttctgcattaagtccaaagcccttatggatggtaaaaggcagtgcctcagccttgtttccagatcttcaaagttagagaaacccgtggcgtgaactgtattggccccagccaaagggccatgaaagcaacagtgtttctggaatgaaaacacctccatcttgagaaagtgggggccgaggcaggcaagcagagagcagggtgcgtgggagacattctcagtggctgtcctgttcatgacacctttcaccagaggctttagaggggcaacatctgtgtgccagtgcccctctttacagaggttccagctggtgaccgaaatagccaggagggtgctatggaggggccaggcaggaagtggggaagagcggttccacgcagcaactgcctggaaaccacaccctagtgctgctcacaggctgaggagaattaaaataaaattaaaagctggtgaaatgacaccaaatgcgcaatccataaaaaaaaggaatgataaattgggctccatcaaaattaaaaacttctgctctgcaaaagacactgttaaaagacaagccacaaacgggaagaaagtatttgcagagccatgtttgacaaaggacttgaatccagattccataaagaactcccaaaactcaataataagaaaacaaacaaccctataaaaacaggcgaaactttttaaagacacttaaccaaagaagatagagaaatagcaaataagtacatttaaaaggtgttcaatgtcattagtcattaggaaaatgcaaattaaaaccacgatgagatccactacacagttgttagatgagcttaaaaaatttgttcaagtgacaataccaagtgctgctaaatgtgggaagcctctggaaatctcatacatcattggttcaaaattagtacaaccatttggggcaacagtttggcagttttttacaaattataacccccagcagggcgtggtggtacacccctgtagtcccagctactcaggaggctgagatgggaggattgagccagggaggccgggcggcagtgacctgagattgtgccactgcgctccagcctgggagacagagcgataccttgtctcaaaaaaaaaaaaaaaaaaaagatagccctagagaaatgaaaatgtatgttctcacagaaaccagaatccaaatgtttgtagtgtatttactcataatcacccaaaaagtacaaacaacctaaatgtcattgaactagtgaacaaaaaaacaaactgtaaagcattcatataatggaatactgctcagccataaaaaggaatgagctactgatatacataacaccatgcatgcatctgaaatgtgtcatgccaatgaaagagtcagacacaaaagaatacatactgtatgattccgtttctgtgacattctcagaaaggctaaaactgtaagattagaaggcacttcaaggccaagcatggaggctcatgcttgtaatcccagcactttgggaggctgaggcaggaggattgttttaggccgggagttagagagcagcctgggcaacaaaacaagacttcatctctacaaaaaaaaaaaaaaaaatttaattagttggccgtggtggcatgcagctgtagttctggcttctttggagactgaggcaggagaatcgcttgggcccgagagttcaaggttacagtggttacagtgagccatgatcatgtcactgcactccagcctgggcaacagaacaggaccctggctcaaaagaaaaaggaaaggaaaggaaaggagagagggaggaagggaaggaaggaaggaaggaaagaaggaaggaaggaaggaagggagggagggaggaagggggagggagggagggagtagggaaggaaggagagaaagaaaaagaaagaaagaaagggaaaagaaaaggaggaggaaggaaggaaggaggaagggagggaaggaggaagggagggagagaggggaaagaaagaaagaaaaaaaaaagaaaagaaagaaagaagaaagaaagaaagaaggagagaaagagagaaagagagagagagagagggagagagagagaaagaaagacagaaagaaagacagaagccaggtatggtggcttatgcctgtaatcccagcactttgggaggcctaggcaggtggatcacaaggtcaggagttcgagatcagcctgaccaacatggtgaaaccccatctctactgaaaatacaaaaattagctgagcgtggtggtgcgcacctgtaatcccagctacttgggaggctgggtcaggagaatcgcttgaacctaggaggcagaggttgcagtgagccgagatcgtgacattgcactccagcctgggtgacagagtaagacttcatctcaaaaaaaaaaaaaaagaaaaaaaacgaagtaaggaaggagagagagagagacagaaagaaaggaagaaagaaagaaagaaagaaagaaagaaagaaagaaagaaagaaagaaagaaagaaagagaaaagaaaggaaggaaaggagagcgggggagggagggaaggaaggaagggaggagggagggaaggaaggggggagggaaggaaggaaggaggaaggaatgaagggagaaagaaagcatccgcagttgccagatttttttgtttgtttgtttgtttgttttggtttggtttggttaggtttggtttttgagaccgagtttcactcttgttgcccaggctggagtgcaatggcatgatcttggctcactacaacttccacctcccgagttcaagcgattctcctgcctcagcctcccaagtagctgggattacaggcacctgccacaatgcctggctaattttttgtatttttagtagagacggggtttcaccatgttgggcaggctggtctcgaactcctgacctcagatgatccacccgcctcagcctccaaaagtgctgggattacaggtgtgagccactgcccccagccctgttcagtatcttaattgtggtggtgattgtggggccatttgcttttgtctaagctcatagaacggtataccaaacagacagacttttaccacattgaattttttaagtgaattaatgtattaaaagggcgtttttaaaaactggtggcaagaaacttcttctcaaaatggatgtgccctttttcagcaaacgtgacaagcagaccctgactgttccatttaagagacacaggtcaagcacctgggagaagtctctgctggcagcctaggcgaatctaggctgagacccccaccaagttctgccttccagggacaactccagagcaaagtaggagcagagaaaaatcccagctggagcttggggctttcatggaggaggcagggtttaaattgggtcctgaggagtgggtaggatccagggctgtggacgtgggggaggcgggagtacatgcatgcacacacaaggctgattccgaaatagggagaggccagtgggcagccgtgtaagaggacagaccacacatgctgacgggaaactgcaagggtctggtcggcacagcccccgagaatcctgtggtgactcatttgggagccagatggaacataaataaatatccaacatctagcctacttagatcaacgagtacaagaggcgtagggaaggcctttttaccaaatgctgtgaatagcccatcagaaagaaaaacatcaaggagaggacgcaatgaccccgtcagctgacactgatggtgtgtctaccatgtgctctttgcaaaccctggatatataatgacacatctaatccacccacaagtccataagggactttcattaccctcattctgcaagtgagaaaatagaggcacagagagattgtgttacatgtccaggatcacatggagggtatgtaggattcaaatccaggcattccaactctgagcacaccctctaaactatatgctgagctactgcttgggtccaagtaattatgactgcagagagagcccaaggtatacttttccaattttttttttatttgagacagagttctgctcttgttgcccaggttggagtgcaatcgtgcaatctcggctcactgcaacccccgcctcccaggttcaagcgattctcctgcctcagcctcctaagtagttggaattacaggcacccgccacctcgccctgctaatttttgtacttttagtagagacaggtttttaccacgttggccagcctggtctcaaactcctgacctcaggtgatccgcccgccttggcctcccaaagtgctgggattacaggcttaagccactgagcctggtcatttttttttcttcacccatgtgtcagcattatgccaccggcccaccacagcctcccggtgtttctccagttgcaattcacacctgtgcagccttgttcagcaggcatgtgtgcacacaggtacacaagagcacacatgccccaagggcatcctttgcccccaaggaagccaagggactccactgagttaaatgacacagaagaatcacaacagactggatcttaaaagtaataagccttttccaaaagaggccaggctttacaagcagcagtgggagccaaatgacgtctaagcagaacagccaataaattaatttcatgtggaaaaaaaacaggttggcccagggataataaagatcccgtcaacatgaagatctcattacgacacagacttccctggcaagggtcgagtctgctgaagctgttttggattcaagcttcaccagggtcccctgtgcctaacaaagattccacaccaaatgcagaaaagatggacctgtctagacatcccctcacataaaccccacagcatcctcgtcagctacacagaagtggaaccgtgtaaagtttcccttaccatggctgccagcagccaggacaactggggggaaaaggcaaacacagctgttgactcaggaatagcattcaggctttaggtaggaattgttattgaacttctagaagattctgaggacttggtggaaatgaaaggggaaattttttttgtagagccagcaatccccttggagaagtagaggcacatcagtgactcatggatgaaattgcagactattccaaatcacaatttgcagtcattcagccagagctgagctcgagtctctctttggcatggctggaaaacaaaagggctcagtcagatcatggttaacgtaaagacagaaaggggatggagatcaaactaatctcattcataaaaataatatccattcagtgttcatgaacatctactcagcacctccggggaggcacttgctaggagctggtgcacagtagtgggtgtagtaggtgtgtgacctcatgaagcttccactgcagaacccagacattgcacacaaggaaacagcgctgactccagactgtggctgcacgctgcccacttccactgtgctcctgcactgctctcgtgggctgacggccacaggcttcagctgcctgtggatcacagcccaaggccttttcacttgctgctctctgcctccctcagaaaggctgcttgttctcatatgtgcgttctcggctcctctgcagggacccaccccaaccaactgtgaattcccaccctccctttcctcccccacccgctgacactatttaccccatgtattttcttcatataacatagtaaggtctcgtgcacttatttttcctatctgtctcttgagctagattgtcagcagctggtgggcaggaactttatctgtcttgcaaaccaatatctgcctggtgaacacagggtgcccggcacatggtcggcatccagaagattttttttaaactatgaatgaaaaacaaaggtcattatgagatatcccatgaggtatggggctaataagcttatgaggtatcccatgagataggggctaaataggttatgagatagctcatgagataggaaccaataaggttatgagctaacccatgaggtaggggccaagaaagtcgggagacagcccatgagatagggtctaataaggttatgagatagcccatgagataggggctaaataggttctgagacagcccataaggtagagaccaataaggttaagagacagcccatggggtagggactaataaggatatgagatagcccatgagatagggtctaaatagattataagatatcccatgagataggaaccaataaggttataagctaacccatgaggtaggggccaagaaagttgtgagacagcccatgagacagggtctaataaggttatgagatagcccatgagataagggctaaataggttatgagataccccatgaggtaggaaccaataaggttatgagatagcccatgagataggggctaaataggttatgagatagcccatgaggtaggggccaagacaattgtgagatagcccaagagacagagtctaataaggttatgagatagcccatgagataggggctaaataggttataagataacccatgaggtagggaccaataaggttatgagctagcccatggggtaggggctaataaagttataagacagcccatgagataggggctaaatagattatgagatacctcatgaggtaggggccaataaggttatgagaaagcccagtaggtagggcccaataaggttatagataggggctaatagagttacgagatagcccatgagttaggggctaataaggttatgagatagcccatgagagagggaggcctgatctaaatgtgtggctggggaggccctccctgagtggtgacatttatgccaagatgagaaggagaatggggctcaccaggtgcatgttgaataagctctctaggcaaaggagaaagcacattcaaagcttccaaggctggaaaagccttgtgctgtgggaatttacggaaagacatcagggctaaaataggatatgtggccagagaggacagcagggacatgtgaaggggtcctaagcctattacagatgtagcaggaagtccctgaggacttgaagcagatgcaggtcatcgtccagtttatatttgtaaggatcttctgggccagacacagtggctctcatctataaccccagcactctgggaggccgaggtgggcagaatgcttgaggccaggagttcaataccagactgggctacataatgagaccccatctctccaaaaaagtatataaaaattagctagagatggtggtatacacctgtggtccaagctactcagaaggctgaggtgagaggatggcttgagcccaggagactgaggctacagtgagctgtgatcacaccactgcatttcagcctgggagacagagtgagaacatttctcaaaaaaaaaaaaaaatcattctggctatttggtagagaacagattataaggggacaagagtagaggcaagaagacaaaaattagaaactgcagcattatgcaagtgagaaataattggggcggggtgttagcgagatgaagggtgaaaatggagggaagtgcatgcatgagggtgtctcctaaagttggccttgcaggctagatgagctaacaagggttaggaactacaaccaaaggccaggctcatgcctgtaatccccacactttgggaggctgaagccagtggatcacttgaggtcaggagttcaagaccagcctggccaacatggtgaaatcccgactctacagaaaatacaaactataactgggcatggtggtgcgtgccagtagtcccagctacttggggggctgaagcaggaaaattgcttgaacccgggaggcagaggttgcagtgagccaagatcatgccactgcactccagcctgggcaacagagagagacgccatctcaaaaaaaaaaaaaaaaaaaaaaaacaaaaacaaaaaaaaaaaaaacaggacagcaacgggggattgtttcaatgatataatttacaaatcatatatctatctgataagggtcttgtatccagaatatagaaataactcttacaactcaacaataaaaagacaaaaaacccaattttaaaatgagcaaaggatgcaaatagacatttctccaagaagttatacaaatggccaacaagcaaataaaaaacgtccaatgactggtcatgagggaaatgcaaagcaaaatcataatgatgcccatgggatggcaatcagcaaaaaatgtaaacagaaaataacacgtgtcagtggggatgtggagaggaaccctcattcattgctggtgggcaggtaaaatggcacagccacagtggcaaaagttaaacatagaattactttgtgactccgcaaattcagtcctaggtatatgtcccaaagaactgaaaacaggtactcagacaaatacatgtacacccctgataccacagcactttcacaataactgagagatggatgtaccccagggctctatcaatattagattaacggataggtacactgtgttatatattacctataatacataggtaatatatgtatcataagtaatatattatacatataatacatatattatatatacacctatgtatatattatatacatatataatattacatgcataaacatattgtgtaaaatatacatattatatattacatacatatatgtatatttatacatatatatgtatacattatgtttgtgtacacatatatgtatatattatatgtgtatattatatattatacataatatatgtattattgatatataacattatataacatgttatatataatattttttatttgtataaaatataatatgtagggtctaataagtttatgagatgttatatatgttatatataacatacataacatgttatatgttatatataatgttacatgttatatataatgttatatatctataacacatatatacatatataacattatatataaaatgtcatatgttatatatatctgtaatacacatataacataaaatatacaaatagtatatctgcattatatattatatacatatatacatatatgatattatatgtcatatttatttcatttttatatttttattatactctatttgtatattgtaaatatatattatacttatatttatttttattgttatattatttattgtatttatatattatatacatatgtatattatatatgtatataaaatatatataacacaatttacttttccatatatgtatgttataatatagtggtccccagctttttcagcaccagggacctgtttcatggaagacagcttttccatggacactgaaggtggaggcggatggtttggggatgaaactgtgccaaccctgatcatcagacactagttagatgctgataaagaacatgagacctagatccctcgcgggctcagttcacaatagcgttagcgctcctatgataatctaatgctgctgctgatctaacaggaggctgagctcaggcggtagtgcttgctcacccaccgcttacttcctgttgtggggccggttcttaacaggccatggtgctggtccatggccccggggcttggggactccaatataattgtgttatatttttcagccataaaaaaatgaagtactgatacatggtacagcttcaataacattatgttcaatgaaagaagtcagacataaaggtcacatattgtcattccgttcatatgagatatctggaataggtaaatccacagagacagaactcagattggcagttgccaggggcttgctggagggggaaatggggagtggctgcttaatgaacgtgggcttttattttggtgtgtgggaatgttttggagctacatggaggtgatggtcgtacaactctgtaaatgtactacatgacaccgaattgttcattttaaaatggttcattttatgctatgtgaaatatacctcaatcaattcatttaaaaaaaaaaaagaataacagccaggtttggggattgaacaatagggtagaaacaagtgccatccttggaggtggggaaggctgagggaaggtatgtttgggggaagctgaagagtttcagtgttggacatgtgacattgggatgcccttaggtatgaaaggagttcccagggaagtagttggatttggaatctcagagctcagataggagatcttagctgtagataagatatttacaactgcttatatataaaagcattttcgaagcaaggagaggaatgagaacaagcgagacagtagtgtaaaagaaaatccaatattaagttccagagaaagtcacatgaagaccaaccagcaagtgaggctctaaaagacagaggtgtagaggaaccttgtgggaagacagtggtgcaggtatcatggcagtgaggaggagagagtgctttaaagaagagaggtcagctgtgtgtgctgatgcagagagacagagactagaagataacagctccaagtgtccatatgtgacaacatggaggtcccaggggctgagaatggcaacaaggaacagaagccagcctctaccagctaacaaaagagagtgggacatgggttcatatctttgcagggaaatggacaaagctggaagccatcatcctcagcaaactaacgcaggaacaaaaacccagacattgcatgttcttactcataagtgggaactgaacaatgagaacacgtggacacagagaggggaacatcacacactggggactgttggggggtggggggcaagaggacggaaagcattaggacaaatacctaatgcatgcggggcttaaaacctagatgacgggttgacaggtgcagcaaaccactatggtacatgtatacctatgtaacaaacttgcatgttctgcgcatttatcccagaacttaaagtaaaatttaaaaaaaagaaaaagttttctttaaaagagggcgggaagtaaaagtatgaagaaagcacggcagacaattctcttgtaagctttggtaagcttccactcctttttagggaatttaaaaaataagaaaatgattgggggaagacgtgaggtcaaaaatgtcccagttaaaagatgggagatattaaacttatttagaaactaggccgggtgtggtggctcacgcctgtaatcccagcaatttgggaggccgaggtgggaggatcacctgaggtcaagagttcgagaccaacctggccagcatggtaaaaaccctgtctctaataaaaacacaaaattagccgggagtggtggcatgcacctgtaactccagttacttgggagactgagacaggagaatcacttgaaccagggaggcggaggttgcagtgagccaagatcgcgccattgcactccaacctgggcaaaaagagtgaaactccatctcaaaaaaaaaaaaaagggaaagaaaaagaaagaaagaaactaatctggaccatggagctgggaaatgcaggagaggggagctaagtgaatgtgaacagagtccttgagacgttttgaggggagggagccagggaactacagggaggggaagaaaagagacaggaagggttacccgagcagggagctttctagaggactggagggaggaaggtgaaggcatttgtgacctgtggctttcatctcttcaatgaaggacaaaacaaggtcacccgcttgtgtaggccagtgtagcccaggtggtttgaggagggcggacaagacatgagccggaaatgaagagagccggcaagcgtgatggcgacagaaacagctgcattctattggcgactttcttttgatatgtcctctatcataggtgatctccaccataaccccagaaagtggaaggagaaaggaggcagctctggggggtggggaggacagaagaccacacccttcacttccttcaagtctttgttcaaatgccactttttcaatgaagttcatgttgaccactcaattttaatttgcacaccatcacactgcactctagctcctagtccctcccaccctgcctcttttaaatagcacttacaccttccaatatgctgtgtaatttatcatttagcttgctgatgtatcccaagtgcttgaacatggtaggtactcaataaatagctgctgaagaatgaataaatggacaaatgaatgaagtagcttctttaagttctctgagagcttctatctttgttacttttatctggtgggtgtcagtctaatcatgaaggaggtcccaaaactctttctgaccacacagccctatcagtgtaaaatttggccatgtccccccaaaatttggccatgggtatttattcatacacaaataatttggtcatattttatttggttaattacatatgttgttactgtataataatacatcacgtgtatttttacctgaaagttttttaattgaacataaagtaaaaataactaatagattgtttttctttgtataccaaagtggagcagcttcttgtagacataagacactaccctaaataataactgagtatgtatgatgtgataagcacattcacatatgacagcacaatagccgccccccacccctccaccacccatatctttactaggtctatttgtattcccacttagtggctgagaaaaccgaggcttacataaatgaaataacttggtctgtgtcccagttagtaagtggcagagccagaattaaaaacttaggggtgtctgaccccaaaactcatgtgcttcagatgtgggacagagactccacccttgagtcaattatagttaaagggagaaaaagtgagaataaactcaccatctcacccttgtggacacaccctgcaatgcgtccccaagctccgcattctggaacaagccatttgtccagtccagagactacattaataccctgcagaaccaggggcgcttacatgggtcctccgtgcccatggaggcaccagaacctaaaaatgttcaagaaatggacagcagaagatatcaaaataacaatgaattgtgccaaactcatctatttccaaggtgaccttatgtcccagtttgacagggacagcccccatttaattatcaatacacaccctttcactctcaaaattatcactcccaaaaatgtcccagtttggatgataaattatatggccaccccatctacaccctggctcagcgcacaccagtctgagcccaagggccgctctgattagaactgaaaatgcagtgatttctcatatccagggacacttctcaccattgcccccagaggtcaaagcagcaggttccccattagcagtggctgaccccaagcaacctgcatggaattcacacccggagccctggaccatctgggccacccagactccttttccataaatcaccccacgtcggccacccagcctggccgccagcttcactcgggtctcacctcaatagagaaacatcatcactgacattaacggaaggtttgccaggggctccactgctcaggtgatcaggggcttgtgttcatcagactcgcttgacaaagaactgggcagccagacacctgctttggagtcctatggctgccaccacaccttggagaggataaggaaaacagggcatccaggcagccagaattgggaccactcaggacagaaccccaaggcacgtggagctgccctggcaattgtcaggggtctccagcgtccctcctgatgctcctccccagcccatgtggtcctcacaggccagccctcccctccccttgcctgagcaacaaagcccaggcaacaagagatatctcctggaagatagcttgaccatcttgctcctgggtaaggaataggtgctagaatttcacccaggtgggccagacagaccacctggtccacagcaagccactccagcccacactggccacagctgaaaatcactcactatcagaaacatcccctgagtcgcttgtgtaaattaccagccctaagaaactcaaggtcaatgtcccagggcttcttattttctctgcctcctggctgtggtctctttccctgagaaaatctggggagttgcagggcacctaaagggatttttgtcgctttctcagtttgattttgttggggggaagcccagaggcccgtgtgatatgccaccaatctaccaaaagttgacatccaccttgaagcacaagacccaaggggaaaaaaaaaaaaactgatccaagatcaaacgttgtagggcatggtaatttttgaagttctaagaaacatttacattattgtattttttaaaccctggtctttgttctttgggttgctagtttcctccccgccgacccccattcccacctggcagactggaaggcaagggacccagggggtaccttgactctgccactaattggtcatgaggctgcgggcaaggctgctcccttccttggcctcagtttctccaggcacactcagcctaggggtctggatcactctgtgagcctggcagggcctgcccagtgaagagcgggtctggcttccagcaggggtctgcctcctagtcccagctggatttgactcggtgcccctgggagggtgaggatggaggcatcttctccaggctccttagcagcacagaaaaggcatgcaaacctttccgctgtggtcagagacagcgagctcactgctggacagaccccagggactccagaatcaagacttcgtagaattgggcttgatggtcttaaagggaaatgtcaggcccagatgggatgctgagtttatctgctggggtcccggcctcctgctcactggttccttcctgtgcctccgagagaagatctccaatggcagctgctgtgtctccactgggcagcatcagagtaaacagcaggttctgggtcaggcacatcctccaggaaaaccactggcttccccactggccttgatggagggaccctgtgcccacagcactcccgcccagaccaggcatctgaaagacagggaacctgcactgaacctgtcctaggaggcagctcccaggtagggagagtttgcccacaggcagagtgaggacatggcagccagggagcctcaggacactggctttggacaccctagactgtggcatccttgagagctggaatcagctcactctgcagccatccctccaacccccaagtcccaacacagagctatgggaattcccctcactgatttttgttttccaaatgctgtggctaccatgtgggtccaaagggagccccatatctgtggtcggaattgtcaaaagctagtgatggcgtggctggattttctcccagactagggtgagaaataaaaagaagggaaatgggaaggttagccattggttcttccaagagaggacttgaggcttgcgattcaccattttaaataaaataaatccattttatttctcagaagcagccccttcatcctcagcagttcagtccaaggactagatggtgtgcaggggtggagggtaagggcagcagacaccagatttggggttcccaggagcgactggccagcagccactgcccagtcctggctgacactgactgcagcgccagccacgctgggcacctcactcccctgaagcgtgccctggcacaagcctccacaaagcactgagttgtaagagactccagcaggcatgtaccccaagagatgatgagaattcgactcagagagactaagacacctaaaaagactcaaccccacattcattaccagacaccttctgcaagcattcatcatttcttctctccagaagtttatggacatggaagcaatacattgaaaccatttcttaatgtcaaacaataatagcaggtactgatctatccaataagatggaaagattatttccattcagttaattagaaaactttacaactaacattcactggatgctaactatcagtcaggcatgttctaagtacttttcatgatcattgcagataaaactcataacacccataggtagtaaatttcactatcaagttcgttttgcgaatgaacttgaggttgaggatcgggcccagagaggttaagaaactcgctcaagatcacacagttcataagtggtagaaatttgaacccaagatgtcagattcagcctctacttaacgatgctttacacaaagaccagagattgaaaattgtgtccaagccacatagctgctatgctgagaggtgcagactgagctgcaggctctcaggctttcagcctgatggatgagtacagtattcacagtgcattctggacacaggagcccttgggaggtggtacatcgtgaggatcctgctgtgctgcagcctcaaaggcaggatgcgtgcctgccagtctcagtccctgcaacattctccaccgttagatgattctgaggctttgtagagtccagagtgaggagcccccaggactgacactggtgaccaccacctgagaaaatggagcccatccacactgccttccttcctcgcaggccagaccaacctcttgtgcaaaaccggtcttgtgtctttccctccctctctcctctctctctccctcccaatccctcaacccagaacacaggctgcatctacactcatccctcacaccttcacggggaccacaagacatgaatcacttctctctgtcaaggttatattttcttgttttaaaaagagcacctattcttcttattattctgaggattaaaaaaaaagtggcatctttttttggctgagaaggtggctgaatttttcaatatattcatgcaaacgagatatttcatctcatggattttatcccagttctgtctatgcacattttaaataaattaagatgaaataaatccattttattatattacccagtgccatctccatgaaataatgcccatatttgtatttcctaaggaatgttgacgtggctaaaaatgtttcagcaagtgtaatctttgaggattgtactgccagaaaaaaaataaacctaggcctttgtttagagcccggagtggcaccacttttgattgaaatggcttgaaatatccaaccccaaaacatggacaaggcagtaaagtacacagaattgatcacccttggctcagaaacaaaagtgctatgccttcctttgttttcttaacatctgttctctccctcccagcataaaccaccccacagaaataaattacacagcctcccttttttgggagaagagaaacggggatttgcagtggccagacctgaggtgcccagggcagactagccaaactctccttgctccctgggtggccgctgcagagactccagactatgtgctcctagcaggtgctactgctgaccttgaaaaccccagcatctccactttccacttccctcaagagatggaagaaacaacatgaaccctgggagaagaagctctgtggcatcttgttttcctttaaaaggcaggtggaccagtgctggtgacacctgcaaagttaacactgcagcccaccagccatcaaaatcaagaagagctaaggaaagtagaaccaaggtgtggcttaaatcactcatttgcccctttcatgcaggagataaactaggctcacaaagaatggatggaagtgaatgataggccaatctgtcaacaagagccaaatcctggggctgtggtttttgtagaaccccaggtataagttgggggtaaaatatatatgtatatatcatgttgtgggagggcaactactggcttcaatctaaagccctggacccctctctcctgctcacacatcctccacatccccttccctaccattccctggcacttctcactctccaccttgagttacacttaacatatgttggctggatggacagacagacggactactcaattacacccagcccagccctttctaaacaaccacccagctgttgcaaacagtggcaataactgctgggtctgtgtacaaacagcaggggaccacctgggatgcatgagccctcaaggccaaagccagcatctccacaagcctgagcatcacagctaaggaacctggctctttttgtggctgtgcttggagatatgattcacatactttctggccaaaaatgagatgcctcatcatctgagatgctgcgaggttccccagcaagaactcaacacaaatgtacaacagcctcccggtagaatagcctatttcccatctccaggacgggcaagggctttcacttgccagagagtcaccagcagcttggaaagacacttccgaccgtacagaaaggggttccctttgaatggcagagattgtatcaggtgctaataggacgaagtgacccccagaccccctcctgtgtgcatccttaaatgtcctaatgaggcggcagccctccttccattaaatgtaaggagatccagacttcctttcccaggccttcatcagggccagttatggaacactcatgaggcctcgtagcaaaatccccaaccttctgcagctcgcacagccaagtgctattctaggctggctcctcctccctccaccgctattagtgtcaattaggttcggcatgacaggccacctttgacaaaatgctggagcaacaaagacataaacaacgccaaagcctttggagttgatgtatggttgcatttaataaacatttgtttgcatattttttatcatgctaatgaatataattactttaatttatgtcatcaagctatgattctgttctgatctatacgtcacttaaatgtgtagcgttagcattttgcacacactggcaatttaagaagggaaaagattcgcccctcctgtgagaacttggagcaacattccagagttgcgcacgcccttgaaaaagctaaaccgagctctgcagctgggacccccatcctcgcacccctgcaaggataggtacgccttccacggcctgacagaccttttccaaagagcacacatttttatttctctgtaatctccccaaaagaggccactgaatacttgcccacagcataatgctaaacacagccatgaaaaaaaaagagttaaaatcgtattaatgggttttactgattataaaagtaaagcaagtttattttagagaatttgagaaaacacagatcacaggaagagactaggtgaagatgataagctaaacttctactctcaaaatcctttgaaatcaaatatatatatttatattaatatattttatatagataagaggatatataatatatatttacgtaaatatatatttcagctatatataaatatacatttaggagaatatatattatatatgtaaaatatatatttagaagaatatatatgcatattagtctaaactgcactagaatacaggaagggttattcttggtagaacagactcatgataagcaaaacatacattcagaaaagaagcacaagaaatgttacaaggtgcaccaagaatgtgccaagcttggatggggcacccccggagcacctgcagtgcactggttgagcaactattgcaggagaactgaggtgggttacccctaaccattgcctttccatggccagcatgttaagcagcgttatggacaggcactggcctgtggtagagacattgtttatgagtacctgctccatagagacagggcagtgcccagatgatctgagccttcactcagaatgggccagctccctgacccctaatacatgagggcaagctatagaaaaagattaaaaattaactgagttggctaagactcctgtctcccacccagagtcactgtgcaacgcccatgccccagaggcactagcaaggggagtcatgtcacagcatgttgctctacaccaataagacatctccttccccataaggccttaatttctcccttccactcagacataccatgaagccacaaggccactggcaaggagatcctgacataacaaccatatggtccaggaagctctctccatcccccactggcaagggggggaacccatcacacaagcagacagcctgggaagtgcgctctgtctatcagagacccttccccagtaaggtttaccagatggctcagcctggggaagcttcttcttcccattcaagcaccagcagggaccagcgaaagcctcagtcacaggagataaaccaagcagaccaaaataacaccacataggctctgaaaattagactgtcattggaaccatagcctttaaaagtaggccagggcctgcatgccaaatctaaacagggtgactgcctgctaaaatgaaagatttaaataggaaccagagtctcctaaaataacatccaaaatgttaaggatacaatcgaaagtcacccatcgtaccaagaaccagcaaaaacacaagttgagtgaaaaaagacaattcatagatgccaacactgagatgagtcagatgttaaaattaactgacaagggttttaaaagtaagtatcataaaagtggttcaacaagcaattacatgttatcttgcaacaaatgaaatattttaaaaatcagtaaaattcagtaaggaaacataacttattaaaaataactaaattatagaattgaaaaattccgtaatagaaatagaaaactgctagataggcttaatactgaatggaggcaacagaaaataaaattggtgaacctgagaatagaccatgaaattcatccattctgaaaaatgtagaacatagactgaaaaaaacaaacagacctgtggataataacaaaaggtgcaacattggcattattgtagtcctagagaatgagaaaaagagtgaggctgaaagagcattcaaagaaataggctgaaaacttcccagattagtcaaaagatataaacccacagattcaaaaaggtagcaaacaccaaataatataaaatcaaaaaagtcatgccaagacacatcataattaaaactgaaaactgaagacaaacaagagtcttgagagcagctagagaaacctacacattaccaaagaaaacaccaaattgaatgacagaagatttcacacctgaaaccatggagtccagaaggaagtagcagtacatttctcaagtgctgaaagaaaaaaaactgtgaactggaaattctatacccaacaaaactatcctttgggaatgaaggagaggtaaattctcagatgaagaaaaactgaaagaacttatcactagcagacctattcataaagtacagctgaacaaagttcttcaactagaaaggaaacaataataaaagagatctcagatattcaggaaggaagaaagaactatggaaagactagaaatgtgaataaacacaatagactctccttctcctaatgagtcttctaaatcacatgtgatgattgaaacaaaaactattgacaccatctgccatacaagatgatatttaaaagtggaaatattttttaattattttaatttttaatttttttatttcaataggtttttgggggaacaggtggtgtttgattacatgaataagttcttcagtggtgatttctgagactttggtgcacccatcagccaagcagagtacactatacccgaggtgtagtccgtcaccatcctcaccctttcccctgagtctccaaagtccaatgtattattcttatacctttgcatcctcatagcttagcccccacatatgagtgagaacatataatgtttagttttccattcctgacttagttcgcttagaataatagtctccagttccatccaggttgctgcaaatgccatcattttgttcctttttatggctgagtagtattaaatggcatatacataccatagtttctttaaccactcattgattgatgggcatttgggctggttccctatttttgcaattgcaaattgtgctgctataaacgtgtgtgcaagtatcttgtttgtataatgacttcctttcttctgggtagatacctagtagtgggattgctagatcaaatggtagatcaacttttagttctttaatgaatctccatactgttttccatagtggttgcactagtttacattccaaccaacagtgcaaaagtgttctcttttcaccacatccatgccaacatttaatattttatttttttgattatggccattcttgcaggagtgaggtggtatagcattgtggtttcaattagcatttaaaagtggaaatatttttttaaagggaggacctaaatgtaattaaagtttccacactttactcaaagttgcaaaatgttattagttgccattttgatattgtgatatctgcagcaacaactaagaaaactacacaaaattatataccccaaaacactacaaataattcagcataaaattcttaaaaatattcaagtaacctatagaaaggcaagaatggagaaatagaggaaatagaaaacaaaataaaataaaatgtcaggctcaagaccaaacatatcaatagttaccttaaaggtaagtagcctaaatatactaattaaatgagattagaagagtaaatttaaaaatcacaacccacctagaagctgtttataagtaattcacttcaaattcaacaacataagtatgttgaaaataaaataggaaaagttatatatcataaagacattaatttctaagacgaaaaaatgcttatattaatagccaaaagagtgaacttcagaccaagaaaaattactgtagacagaaagacattacacaattgacaaaagtgccaatccaccaggaagacaaaacaatcatagatgggtacacaccaaataacaaaggttcaaacatatgaaacaaaaaatgacagagctagctgggcatagtggctcacacctgtaatcctagcactttgggaggccaaggcaggtggatcccctgaggtcaggagttcaagaccagcttggccaacatggtgaaactccatctctactaaaaatgcaaaaattagctgggcatggtggcatgctcctgtagtctcagctactcaggaggctgaggcaggagaatctcttgaacccaggaggcagaggttgcagtgagctaagatcatgccactacactccagcctgggtgacagagagagaccccatctcaagaaaaaaaaaaatagagcttaaaagagaaatagataaatccataattataattggggacttgagaccctcagcatctgacagaactactgaacagaaaatcagcaaggatagaaatgatttgcaaaatacaaccaaccaccaggatctcattggcatatatttaatactccaccaaaacaacagaagaatatacatttttttccaagggcctatagaaaattcaccaaaataaaccaaattgtgagccataaaataaaccccaacaaatataaaagaatttaaattatccaaagtatgccttctgactacagcaaaatcaaactagaaatcagaaaaggaagagaaaaggaagatgaaagaaagacaacaagaaaatgtctaagcacttggaaattaaataacatacttccaagtaattcatcggtcaatgaggaagcctcaaaggacacggaaattttaaaagatagaactgaatacaaacaaaaatacaacatataaaaataaatgggatgcagctaaagcagtccttagggaaaatttatagcactagattcacacattaaaacagaggaaatgtctcaaatcaataatctgagcaaaataaacccccaaaaagcagaggaaggaaataataaatatcagagcagacatcaatgaaaatgaaaatgggaaaacatacttaatgacaaaagactgagtactttccctctaggggcagaattaaggcaaggttgttgcctgtaccacctttactgagcacagtaaacgggagttctagccactgaacaagtaaatgagaagaaacaaaagacatatatattggaaaggaacaaataaagccatccctaataataatttaaattcttttatgtttgttggggtttgctttatgacctatgatttggtttattttggtgaattttccataggcccttgaaaaaaatttgtattctgctgttgtttgggtgaagtattatatacatgccaatgagatcctgacagttgattgtgtttttcagagaaaaatcaaagaaacaaaaagctatttctttgaaaaaattaataaattttagcaagagtgtcaaatataaaatgagaaaaacacaacttatgagtatcagggataaagaaggaatattcctatagatcttggaaacatcaaaaaataatatgagaatactacaaacatttccttcaacagctgaggaaaaaaagtgggccaatttctcaaaaaacgcaaactagcaaaattcagttaaatcaaatatataatgtgactagatctaaccattacagaattgaattcatactttaaaatctgccctccttaaaaaaaaagaaagaaagaaagaaatctccaggcccagatggctttactggagaatcctatcaaacatttaaaaattaacatcaataacaccaattttacacaaactactccagaaaacagaagaagagagaacatttctcaacttattttatgagtcctgtattactctgatatcaaaatcatataaaaaaattttaaagaaaattgcagactattagctgtcatgaacttagatgcaaaaactctcaacaaaatattagcaaatcaaatctgacaatctattaaaataattatatgccataaccaaatgggatttatcccaggtatgcaaggctggttcaatattcaaaaatcagtcaatgtaatacatcatatcaacactctaagaagtttaatcatatgatcagatcaattgacaactcaaaagcatttgacaaaacctaatacccactcaggataaaaattctcagaaagttaggaatggaagggaactacatccacttgataaagagcatctacaaaaccactacagccaacattatacttaatgacaaaagactgaatactttccctctagggccaggatcaaagcaaggttgttgcctgtaccacttttattgagcacagtcagcagttctagccactgtaatgagtaaatgagaagaaataaaagacatacatattgaaaaagaagaaataaaaccatccctacttgaaaatgacataattatctacatagaaaataccaagggacttacaaaaacattcctagaatgaataagtaaggttagcaaggccacaggatgaaaaagcaacacaaaaatcaactgcatttttatatattaacaatgaggctgggcgtggtggctcagacctgtaatcccagcactgtgggaggccgaggcgggcctcttgaggtcaggactttgagacaggcctggccaacatggcgaaatcccgtctctacaaaatacaaaataattagccgagtgtggtggtgggtgcctgtaatcccagctgctcaggaggctggggcaggagaattgcttgaacccagggggcggaggttgcagtgagctgagattgcactgcactccagcctgggtgacagagcaagactctgccaaaaaaaaaagcaaacgaacaaaaacaatcaatatgtagaaatccaaattaaggccacaataacatttataatcactccagggaaaatgatacaatgaaaaactatagttttacaagatgttactattgtataaagggcacatgggaacactgttgtttcctacaactgcacatgaatctacaattatctcaaaataaagtttttaaaaggcacagccctttggaaaacattttgacacattattataaagttaaagcatatacttaccatttgaccaagcaattccacttctaggtatttacccaagagaaatgaagacgtatgtccacatttaaaaatctacatgcaattatttgtaatcaccaaaactggaaacaactcaaacgtctatcaactggtgaatagattaacaaactgtatacattcatacaatagaattctacttaacagtaaaaaaattattgattattgatacatgtaacaacacagatggattgtgtgattttcaaaaaccgcagaaaaaaggcctttaggttgaaaggattcgtaaatattaagcagaaagacagaacaaaattgaaatgagagttacctcctctgcaaaagtcagagtgccaagaaaaagatagaaccctaaaaacttccagaaaaaaaatgttacctgcaaaagaaaaaggatcatgttgtcacctgacttttttgagcaaggatcatattggcacctgacttttttgaacatatcataacatttttgagatagaattatattaaatttacatttctgtaccaagccaaaacatcagtcaagctttagggtaaaacaaactaaaataataattcaagagtattaggagataataaaccatagtgcacaaagaaatcagtaaaatttatagttgggtctaattcattaattgactgaaagaaagttaaacaaactgggaataaaatctctactgataatgataccagaggtgtgggatacaggttgagaaggagtaggaagtaaatagtagggagaagatattaattttagacattaaaagaaaatattattaagattttcagagtaaatacaaacaatttttttgagatggggtcttgctgtgtcacccacgctggagtgcagtggcacaattatagcacactgcagccctgaactcctgggttcaagcaacctcctgcctcagcctcctgggtagctgggattgcaagtgcaagccaccatgcctacctaaatttttagaaattttctgtagggataaggtctcactatgttgcccaggctagtctcaaactcctggcctcaagctgtcttcccatctcagcctcccaaagtgctgagattacaggcttgagccaatgcatccagcacaaacaaactttaaaaaggtgttttaactgccaaaccactggaagaaaaacatggatgtgaatatatagaaaaagctctagaaggacacacactaaactgacaacatgaattcctataaagagtatgggggaggggatatggggttggtctgagggacttcagccgtatctgtagcattttagcatctacaagaatgtattcattcttgtacagattgtgcagatttgaacaatccttactttaattgtcaaagacagaaaaaatatctggaaggccaaggtgggtggatcacttgaggtcaggagttcaagacctgcctgaccaatatggtgaaaccctgtctgtactaaaaatgcaaaaacaattagccgggcgtggtggtgggtgcctgtaatctcagctacttgggaggtcgaggcaggagaattgctagaacctgggaggcagaggtttcagtgagccaagatcacaccattgcactccagtctgggcaacaagagtgaaactccgtctaatatatacatatatattatatatgtatattttatatatataatcaatactagaggaaatttgaggaagaagacaattttactcagtataaagtgggatatagtttgtgaaagttttgcaataagtattaaatgtgggccaggtaccaacatttaatacttatttagtagtacaacataatacttatttagtagtacaacacactaaatattcattgtaatatttaactaaataaaatcaagtactgagagaatgataaatgtcatcagtgcccaaaaaatgatcagctttacaatagtagtgcatttttatctagttttatttacaaatatatctagacatagagatgtaaaacagaaagatacaaagagacttggggctagctttattcacaaaatagggatttcttgtgcttttttcttactaatttgaaactatatttattagagttttgtagtctgtttgttctcgcacacactcataacctatttgcataccagtaaatagtcttcaaaagtatcattcttaatggctgaataatatctcatactttatatgcaccgtaataatttattatatggagatttaagtaatttccaatttttgtctaatttaaataaaatcacagtgaacatcattatacatacatatgtgtggacatctgtgattctttaagtaatttcttaaaattgaactgctggtccaaaaaatgtactcatttttaagactttgttttgagacaggatctcactctctcacccaggctggagtgcagtgatgtgatcatagctgactgcagcctcaacctcccaagttcaagcaatcctcccacctcaccctcccaagtagctgagactatagcttgcgccatcacactctgctaatttttgtatttttttgtagagagagggtttccacatgttgcccaggctggtctgaaacttctgggctgaagcgatccatccaccttggcctctgcaagtgctgggattacatgtgtgagctaccacagtgcccggccaacatttaacacttattgcaaaactttcacaaaatatatcccagtttatactgaataaaatcttcttcttcaaacttcctctagcattgattaataatttttctgtctttgataatcaaagtaaggattgttcaaatctgcctatctttgataactactgaagtttagccatctttgaatgtttttatcgtccacctatatttctaatgttagtaattgtctgttcattctgtttgataattggtttttatttcttattaatctgtaaaagctattattaagaaatgtcatcaaccatttgttgtgtatattttaaacaattttcacaatttagtttccctttaatttcatttgtgatgtcatttgaaaaacaatttctatttttatgtccatttttcccctttggttctctgcctttgacgtcatgttacaaaggctgatctcactatcgcatcgacatttttctgattcctactcttttgtggtttcattttttaaacttgaatctttattacacctgtgacgatctaactttatgataaggttcttttttccaaatgatgagatggttgtcccaacaccatttctactttccccactgacttttactaaattccacttaacttctcaaaaagtatttgactatatctttattgcaaaagtcatactatacagacaatgcaaaaattctccttgacaaaagcctcattccatttctaattgcattctcttatcagaactaactgtaaatcagtttgatgtgtggaaatccagaggtttcttcatagtaaaaataactggcatttaggagggcttaccacatgtgcggccgtgccttaaggcatgtgtcaacttgtgtgatcttcccaacagcctaccaagtaggcacaacagctatctccattttaccattttacagaacaggaaactgagacacagagggtacagaactgagaaacctgctcagggatgcccagatggcagaatggggattcaaattcaggaatctagcttcaggatcggcagaatgttgactgatgtcctgctatctcctaatacacctacttgcacttcagtgaaaaacacatggcactattttcttttaaaatgaaagtttgaggctgggtgcagtggctcacacctgtaatcacagcactttggaacaccgaggcaggaggaatgtgtcccaccccttgcatgagcccaggagtttgaggtcgcagtgagccacaattgtgctattgcactccagcctgggcaaacagaaggagatcctgtctctaatgaatgaatgtctgaattaatgaataaatacataaagaaaaataaagttgggtctatggatttgatatcatactatccaaattatgctatagcctttttgatcaaatatcaatatctcttggttgtctttccatatgaattcatataaatcaatttcagtttttttaaactacgatacactatgatttactacagtttacgtaactcttctattagagtatagttaggttgtttctagcctttcaccatcagtaaggctgcaaagaacatctctagcatgactccctgtacatttttgtgaaagtttctcttgtttctcttttgttttttctcagtcatgtagtatgtgatttttttgtttgtttgtttgttgttgtttttgtttttgttttttttgagacaaggtctggctctgtcacctaggctggataggctggagtacagtggtgcaatcacgacacagcacactgcagtttctatcttctgggctcaagcaattctcctacctcagtctctcaagtagctgagcctacaggtaagcatcaccttgcctgcctgtcttttttatcttttgtagagacaagatctcactatgttgcccaggctggtctccaactccagagctcaagcaatcctcccaaagtgctgggattacaggcatgagccacacacccagcttgcatttttaaatttaacaaatactgccaaattgccctcccaactatctgaaccaatttataccccataagcaaaatatgatagtacttgtttctttataacatcccaacagttgatactatcaaacttattttcaatataatgagtgaaaaatgatacctccttgtgcattatttgggatgttcctcactactggtgaagttgagcaactttttatgcttattttccattttggttccccttttattcgttgcctgtttgtatatttttattatttcccctttgaattaatgatcttcttcttattgatttataaatgtttacatatattttggatgctaatcctttgtctattgcaaatgtaaatattttccaccagcatgtgttcttttaattttgtttatggtgtcttttcttgtttatagaaacttgtgtcatagagaagcttttaattttatttgggcaaacatcatattttcttttgtggtttatatgctatattttctttcgctcagtttgcaggttttatttttgtataacatttagctctttaatccatctggaatttactttggtgactagtgtaatgttaaaaatataattttgtttttacaaatagtatctaattttccacacaatttattctttcccttactaatatgaaatgccgatttttcccaaaattttatgtatatctatagggatctgtttctggactcattacgttgttctagttaaatttttagcttcaataccattctacgtcaattaatatagctttaaaatatatatattgatatttagtaaggtaggtgcacctcttgtttttcttctaaattatctttgtccttcttatgcatttactgtttcatatgaattctataatcagctagtcaagttccatataaatgctgttggacatggaatttttacatgagtttggggaaaatatctatctttacaatattaagcactgttatccaaaattaaggtatatatctctacatattagtatctattatgctcctcataagctgaggtttcttcctagatattctatagttttcattgctatgcgtgaatagggtaattttgcgaattgggtaattttatctatgactttttctaataagataatactattgtattaaaaactattagtttttatgtgtttattttgtactgggccattttataatactttcttattagctttaatggtttctcaactgattatcttattcttcctagggagcttggctgaaaaaaacaaaatgacactataatctctttctccattattcacatgcctttttaattttttcttattgtatagcgttggcaaagacctccaatacaatattgaatatagaagtgataggaaactttgtcttgctggtgactgaaatggaaatagtcctcatggtttcaccactgctaagtttctagtagaaatctttactttgataatggaagttttcttatatatttcatgtgcaagaatttttgagtgcctggggaggcgtttgtttgcttatcatgaaagagtaaattggaaaaaaaatgttttcacttctgttatgattttaatctcagatttatacaaggcttctagaacgaattgagtaacttcccaatttataacataagaattatctatttcttaaaggtgttatagaatgaaatattaaaaccatctggtcttgatgttttccctaaatgtatatttgtaactagctttctaattttctcaatagaaatagcatatttagactttctattacttcttgagctaattttgaaaatcacgcatttcatctagttttttagttattagtacaaagacactatcttacaaaatttaattccttctctatctgtaattacatcttatctcctttctcatgctgtttatttatgctctcttttttccttaaacttgaagaagtttttattgaccaactctactagctttgttgttcttgtttattttattaatgtcattttatctttattaattcctctcttcaactttctggagatttgatttttttgttctttgtagtctcctgaatattatgcttggttcatttgatttcaattttgctcattttctgatgtatgcatttaagtccataaattttcctctgataactgctttggccacatctcagaggttttaatatttaatgctctattgcttatttctaaatagtttgtaatttccactttttatttccttattaacagaagactttttgtaagtgtttttatatttatgagagtggagatttatttaatttctcttttagttattttctcatttgttcagggaatggaacttacatatccctacttcttagaatttgctgagattttctttgtaatctaacatattatcaatttgtgtaagtgatttatgtgtgtgtcaaaagaatgtgtgctataagcttgttaatacaaagttgttcattgtgtcatttaaattctctgtcattatttttgtctatttgaaatattcatttcttagacaactatgaaatttgaccttctgtgattgcaggtttgtcagtttctctttatatttctattaatttttgcttacattttccaaagcaacattgtgaaggacacaaaggtttacaattatatcttcttggtggctgttatttttaatattatgaactattcctctatgtactctaatgtacgccctctgactttatatgactcataaatcatattataaatttttaaagcagttaggccttcatcttgactctgtttctttccattgatttaactgattattttggggtaaataccacacttttgtctattgtggctttataagttaatttttatctgatagttaaattattgattactctaacattattcactcttccacatttaggtttattttgcaaaaccaccaacagaatccaatttaaaatgttgagtgaagtgccagattcagtggcatatgcctgtagtcctagctactcaggaggctgagaagggaggactgcttgagctcaggagttcaagtccagcccgggcaacgtaaaaagatcctgcctctcaacaattttttaaatttgttttcaattattggaaaagaattacttacaaatcaacttaggggcatttctctttatgtagcactgaagtctacttatatgcacctcacaaaaaatgtatttccttcatatatgacgggtccacttcttaagttaggggatttttttttttttggtattttgtattttgtgtcttcaatataaatagagtatttttccttatcttttatctctaacctttattcccagcataatatgtgggacatgttttatttacatgtatctgttttattattagacatattactgaattcctttataaggcataggagtatttcagatgatgttcttcagatttttcatattatcataaaatagtaaaaattttgacttgaccatttccatatttattccccaattgtttttattttgactgtcatttttatcatatcattatctaagacttgttttgttaccataacaataattcctacaactttttgttttatttgtattttaagttctggggtacacgtgcaggacatgcaggtttgttacataggtaaacgtgtgccatggtggtttgctgcacctatcaaagtattaagcctggcatgcattagctatttttcctgatgctctccctgctccaccctcctgtgacaggtcccagtgtgtgttgttcccctccctgtgttctctttccccatcagtgatagactggataaagaacatgtggtacttatacaccatggaatactatgcagccataaaaaggaatgagatcatgtcctttgcagggacgtgcatgaagctggaagccattatcctcagcaaactaatgcaggaacagaaaatcaaacaccacatgttctcacttacaacttttttatttttaagtatttgtaggctgttgttttgagatagattatcatataaaaccaagaaggctcaacattagtacaatcaatatgcagggctggataattctttgctgggggagggagagccctttcctgaacattgtaggatatttaggagtaaccttaacctctacttacaacataccagtagcactacctccaagtcatgacaatcaaaaacgtttccaggtactgcctcctgagaggcaatgtccttgattgagaaacagtatgcaatgcattatccttctcttcctattttaatcacagcttttggcaggactgatgttgaattttatcgaatgtccttttggcatatgattacatatttctcccaggtacctattgatgtaataaatttttaattatatattttctgatttggtgccatccttacaatagaggagaaaggctttattagtcaagatttattatttttaatataaggttagtgttcattttttatgacttttacctatatgtttacatgtgaggttgacttgtaggttttgtttgtttgtgacgtttgttaggtttgagcacaaaaataatgcttgcttggtaagtagcatgatcactttttgttccttaagacatttaaatcaatttcctatacaaccatccattttaatgtatttttacattattcttttcttattcaactactctatagttaagtttagtaatttgtaccacaatgagataccatctcacaccagtcagaatggtgattattaaaaagtcaagaaacaacagatgctggcaagtctgtggagaaataggaatgttcttacactgttggtaggaatgtaaattagttcaaccattgtgaaagacagtgtggtgattcctcaaagacctagaaccagaaatgccatttgacccagcaatcccattactgggtcaaaggaatataaatcattttattataaagatacatgcacatgtatgttcattgcagcactattcacaatagcgaatgcatggaatcaacccaaatgcccatcaatgatagactgaataaagaaaatgtggtacatatacaccatggaatactacgcagtcacaaaaaggaatgagatcgtgtctttgcagggacatggatggagctgaaagccattatcctcagcaaactgcaaactaatgcaggaacagaaaaccaaacaccacatgttcttacttataagtagaagctgaacaatgagaacacgtggacacagggaggggaacaacacacactggggcctgtggggggtgggatgtggggagggaaagcatcaggttaaatagttaattcatgcagggcttaatacccaggtgatgggttgatctgtgcagcaaaccaccatggcacatgtttacctgtgtaacaaacctgcacatcctgcacatgtatcccagaacttataattaaattaaattttaaaaacttagtaatttgaaatttcctagaaagtcatttatttcaacaaaattttctatgataatatatctatattttctaccacttttaactttttggaatacatgtatattctccttttttatttctaatgtttttacatgtgttttctcactctgtttcacttaagtaacttgtcagatgtctttgacaaattctaattcttagacttggcaatgtactgtctgttttctgatttactaagttatgttgtatctttatcaatatctttctagtttatttcattgttgtctttctaattattgtgagctaaaagcttaattcatgcatttttattctacattcaataatgtgatatttaaggctatgtgttttcttctgaatatagctttgagcatacatcataaggttgatatatggtattctcattgtaattattttctaaatagtctccaaatatagttttgatgtcctctttgatctaaaagataattcagagcggtcttaataattttagaaattgcccatcaaaattgtagttacccttctttgttgattgtataaaataagggatctgcccactttttgattctttgactatatccaaccttttttatagccaatatatactatttagtgaatatttcataggctttaatatagtctctcatttagaaaaaaatctcgatttaagaaacaactttattatttgaaatcatctaaatccttggattccttgcctactagatctgccaaataccaaaagagatgtcttaaagtttttcattacaactgtgaatctctccacttcttcttgtactcctaacaatcttgcttgctacatcttactgcaatgctatttggcatattgggagccatgactagttcagtctactagcctgtaagcccagcaaagacaggaatcacatctgacttgcctaacgttgagtcccagcccctggcccaatatttactaaataattgtgggaatcaattgacaagtgatagagattcagtgttgagtatatgaccttcaacaaaaatactttactattatatctaatttttttaccctcaattctactttgtctgatgcctagatagacagatagacagacagacagatagatggaatttttggagataggattttgctctgttgtccaagctagagtacagcagcatgatcacagctcactgcagcctcaacctcctgggctcaatggatcctcccacctcaacctcctaagtagctgggaccacaagcatgcacctccatgcccggctaatttctttttgctttttatagagatggggtctcgctacattgtctaggctggtttggaattcctgggctcaagtgatcctcctgccttggcttcctaaagtgctaggattacaggcgtgagccactacgccttgtcaatgatgtcagtatttgtccctgtattttgctggtttgttttacttgacatatattatatatcttgttgttgggttttggtgggtttttctgtttttgtttttgttttgctttgcttttttgtgtttctttatctgctccatccttagttctatgaaatctattttctttgtgattgtcttcaatatacagagatacagtttagaattcaagtcataaatggtttcaagtgtttccaatgtattacttaacctctatatttaactcctatgtttttctaattttcaggtcagagaggcaattgaatcttttagttcttttttttaacacaatgtagttaatacatttttattctcctcttccagaccccatgctactatttcttttccaagtactcctcagacacttattaaataaactaggactttataggttgattattactaatttttacacaataggactttgaaagtgaatttttaacacttgaattcagtttttcaaataaagtctcaattttttttttttttttttttttgagacggagtctcgctttgtcgcccaggctggagtgcagtggcatgattttggctcactgcaagctctgcctaccgggttcacgctattctcctgcctcccgagtaactgggactagaggcgcccgccaccacgcccagctaattttttgtatttttagtacagacggggtttcaccgtgttacccaggatggtctcgacctcctggcctcgtgacccgcctgccttggcctcgcaaagtgctgggattacgggcgtgagccaccacatctggccctgaagtctcaattacttagacagcattttttaaaagtataagtgaggtttgtccttcttcttctaggcaaagctgcacctctcaccccctataccagacagtcctttgctatggacacacagggtggtaggacacacaggattctcataggcagttctggttctcctatggaccaagtagcaccagtgcccaaaggcagccctctgccaatggttgtaggtgaggaagctaagagcaaagcatccgttggaagctggtagaagccaggcttggtggctcacactgtaatcccagcactttgcgaggctgaaacaggaggattgcttgagccccagagtacaagaccagcctgggcagtgtaaagaaaccaccccctcccccgcccccataaaaaaattaaaaacatagctgggtgtggtgctgcacacctgtaattccagctactctggaggctgaggctggaggatcacttgaggccaggagcttgagaccaacatgggcaacatagcaagatcctgtctctacaaaaaatttaaaaatttttagctgggcatggtggtgcatacctgtagtcccagctactagagaggctgaagcaggaggatttcttgagcccaggagttcaaggatacagtgagctatgatcacaccactgcactccagcctgggtgacagagcaagaccctgtctcaaagagaagaagaaaaggaagaagaagaagaagaggaggaggaggaggaggaggaagaagaagaagaagaggaggaggaggaggaagaagaagaggaagaagaagaggaagaggaggaggaggaggaggaagaggaagaggaagaagcagctggtagaaaaattggagggtctggacagggcaccagggatgtctgctacaccagcacaccagtgcaagcagcaggcgggggcagtgtccccaaagaccccccactgggctaggcttgagctgcagctgcacctgctgcaggtgacatgctcagcctgcccttctcacctggccatcacacgtggacttactcccatcttcagactttgtgtcaattgcatctcagccaaggtttccattaatgggttattatattatatcacctgcaaaacagagaaaaggagggctgttctaaaattctaacgtgaaaagtgagcgtgtcaaatgcagaatgtgcagacacagtgaccatggagtttaccactttattaaaattgtgattgttcacataaagactcaaacaggtcacatattaataattatcactgacaatctttaacatcagccgaagcccacaagtgaagcaatattacatctcccggtctcatttatcttactgcttatggcccctctgtggtcagcacgctgtgagctttgtggacatttaattatgagcacatcataaatggagctgacagggcagaggctgcccagggatgctcctggcaagggggtcacggtggaaagtagttagttgatgcaccctcccgaacagggcgtggcagagactgcttctccacgtggccccgctaccgttccctgttgcccactgcagaggcagtaggccggaatgtgttcagttattgacagccctctaactttcagaagcgtcagcccagttgccttaaaacctaagaccagccccacagtctctcctgtcccgcttagctctgagagtcccttggcttgcctctctgtgtgtcttcggctgtttacagagctctctaaatgtgggcttcactctgatgcacatgaagagggtggactttcttcccataccccaggggtccagagatcccactgtcctctccagctgtccccagtgtcttctgtgcaaaccactcagctctaacaaggtgcaaaggacagtgagggccccaagaacatcctggcccctcacctcaatgcaggaaatacctttccactacagcaaaaaaaaaagggactctgcaacgcaagtggtggggtggggagggcttttttgttcgcttctaattagccaccgctctgatgtgatagccaaggcgtcacgcactaataaggccacgcgtgtccccgagtggacctgggagagcagcaggacttccccatgtcatgtttcaaagcaactgtcctcggagggccgaggtacggattcctccactgccccagcaggctcgatggggaagacaaagcgtataataaggggcgtgcgatgaaggggctccgaggagaaagctgaaaagtagctatcatgttggcagataaattctacacacaattattcattcctagcctcttgacatgtagattaatgagtttgataacccaggcttctaagaagtagattccactctgttcgcaggctttctccccctctacctacaaacagcacacaggtctatggagaaaaaaacaaatcgatacatttgcagtggccatcactgctttttgtggttggagccctacgtcaaaaatatgatgtgtcttctccttcctggcgtgggagaagccagtcatggccaggcggaccctggaggggactgtgggcttcagatcttggactccactaagtcctggactctttttagtgggctgggcatggagcatttccaactccagtcccgagggaaaagggccatttattgacagagcagctgtagcctgctattgtgccttaggttgaagtccctgctggcagagttccaggtcagcacccagacatcctcgccaagaaagagccatatggaggaaggaatgacgcaggagcaggacagtcacacctacacccacgccaggtatttcacttaggaccggtgaacagcaccaaactccaacccaagtgtaaggagttcaaatccttgaaaagagaaattgggttcactgcattcatcaagatgatttggggtttatgttacgattccatcacccccaacccacagtgatgcagattttggagatgtattttgattatccattcctttgactttttagccatttggcaacagcatttctagatctcagcctcattttatttccttttcatcacgttggtgtttatgttctaaagataaaacacgtgggggaggtggagagggtagaggggaaggcttcccacctgatatcctgctaggaggttttatggccaccctcctctgccaggcaagccctctgggaaacagagtagacctcaaaaacctagagtggggccaggcacggtggctcatgcctgtaattccagcactttgggaggccgaggcagatggatcacttgtggccagaagttcgagaccagcctggccaacatggtgagaccctgtctctactaaaaatacaaaaattagcctggcaagatggtgggcgcctgtaatcccagctactcaggaggctgagacaggagagtcacttgaacctgggaggcatagatttcagtgagccgagattgcaccactgcactccagcctgggtgacaaagactctgagaaaaaaaaaatccctagagggagtagagggagccctgtctgggtgctgggtgactgaataattcacctcccccagtcatcacagattcaatgtctgtgaaatctgtgtggctgctggaaataaggggtacagggagatcattcttcaagacaccttcttttatcctccagaaagagaaatgaatggagtggaaattcacccagctcacaaaagtccaatgaggtctttgattagcaacatggatcagttcaagcatttgaatttcaacacagcttccatgccaacttcaaaagagacagccctgagctacacaaagagggaaaagtctctttcccctattcgagtagtcttgaggagccaggcttctcacagagtcttggggtgaggatcgccaggtttagcaaataaaaattcaggatgcccacttacatttgaatttcagataaacagggaatcattttttagtataaatatgtcccaaatatgcatggaactaaaaagataatttaccatatactaaatactaagataatataccaaaaaatattttagtattcgtatgtcctatgcatatttgagacatatttatactaaaaaattattcaatatctgaaattcaaatttaagcagacatctagtatttcatctgacaaccctattcagggtgtccttgtaaaactgctcagggaagaaccagggtgtgaccaaggagaaaagagcaaaaacaggctcaaaattcaagacagccacacccaggggcctcttccatccctccatctggcctctccgaaaacatcctgcttccttctgagcccaaagctccaaccactgaaagaaaacttggaccattgttcctgagtagatgagaagcctccatctccggcttccagggctctgtatataagaccctaaactggagggtatggggctgggaggacaccaaggtagacctcaagaaaccagagcccatgggactgtccttgacagctgccttcctgctccccgaatacagaacctcctacctcaccacggcccagttgggctttttctagaagacagcggaggtttggaggtcctactctcccacctggcctggcagaaatcccagaacagaactacagaatgcaattggggcagggagtggggagaaaatccagcactgcttcctttttcaaatcaattatggccagactgactcatcttctctcatagaccagaaagtcccacatcttgttgtttcttaatcatatggaaacctaaatatagacatatctgcagaaggacaagctgagaaaaccagtatccttgttctcccaggggaaagctcgattctcactcttttctcctgggttttagttttgggactgtgttcccagtagtgcacagagcatgcgcctgttggggcaatggcagcaactcagacctacttccaggtctgctgctgcgcctgggtccccatcacataccgcttgatcttgcctctggaaagacctccatcttccatcccaccgtgagagcaatatgatgagaaggaagccaggcacctcagtcacatctcagcagagggcctttgtgaatggaaccctcactgatgtctggccttgagcagacacccaaggctgcaggctccagagatgatctcagcagaagagtcccactgagcaccaggccaggcatagtggagtcaatcaggcacccaggaggaagcaggacccctgcaatgctttgcgtcccagtccttcttcccttcactcatttctgggaaacagcacaaaggatggctttattgggaaatagcttattacccttctggaagggtcttgaggccccaagtttcagaaagctggggccacggagaaaatgtagctgtgctgcacagaacagagatgcaaatgagatagccaatcctatgatcctaacaaaagtcagtttgtccggaaaaagcattttagaggagatcaaagtcatgtcagagtagccacgaaaaagctttagcaaagcacagtggtcagatttagcaatgagaataatgagaccagggaagagcggccagtagcctgggattctttggtgcaacatgaatgaggacaaaatcaggatgtcattgacagccaaccaacagcccaggcttcatgcagcaggcaacctgggcagcaggacctggacttcaaggctaaaggagcgtctgtcagctaactctcctgctgtctccacgccatgcccaaagcacaatctaatatcttcctggcatccctagacaagaggtggaaacctggcagctcataagccacaatacagcccacaatcttgctcagttcaaacagtagtgggtaaatatttgaattaattgctaatattttaaaagcagatttgggactcggtgcagtggctcacgtctgtagtcccagtaccctgggaggctgaggtgggcagatcacttgaggtgaggagttcgggaccagcctggcctacatggtgaaaccccctctctattaaaatacaaaactagctaggtgtggtggctcatgcctgtagtcccagctacttgaggggctgaggcaggagaatcacttgaacctgggaggcagaggttgcagtgcaccgagattgtaccgctgcactccagcctgggcaacagagcgatactctctctcaaaaaaaaaaaaagaaaaaagaaaaaaaattagccaggcatggtggtgggcatctgtaatcccggctactcaggaggctgaggcaagagaattgcttgaacctgggaggcagaggttgcagtgaaccaagatcatgccactgcactccagcctgggcaagagatggagatttggtctcaaaaaaaaaaaaaagaaaaaatgaaaaaaatcagatttcgcaggaaaatccagatttcaggtttcttttgaaaaatcagaagatctgacaacactgggcctgtgtctgattgacaggagccaagggacagcctcccttagatacggcacatccttgccagttctccgcagtccccagcactccctattgcctaacctctgctccgtgggtcggtgcactgtgaaggccctgcccttggcaccaaaggaccacaacaggaacacaagcacctctaccctccccagaagccttttcccactggtcccctcccatctctcagaagaaccattattctaggcaccttccctcctataacttcaggtccccaagggcctgtgatctgccatctaccaccccaatagaggcatacgtgcataagacaaaaaccccagtgtcttggaaactgtctagaaaataatttaaataacagacatcgcagcatttttagaccaaaaaaaaaatgtaacaaagtcatgcccaaggcccagggttaaatgcaacccacatggcaagaatgacatgcccatttcacagactgtggcatcagaggtcaaagtcctatttcccctgactctattccctttaattttcaggatgaatggctcacccgtgggggtggaggggcaggaagtttcatcaatgtattaagtgttgaagggggaaaaagttctgatgggctgattcaggaattgggattctgggcagagctttacaaaaggataatgtatctttaagcctaggtgcccttcagggaatgtattggataaatgtcttctgaaaagcctgtaaatattccatcgcctcactgtcattactaccatgaaatgaaaatgaagcatgaaagaaatataattccatattcagatgacagcattagcctccataagcaaactgaaatatttattagtaaaatgttcagtatctacgcctgtaatctaaaaaaaggacaaaaatgttttataataaaaaagagattgaatgcagaggtaaaatctggttggctgattttattgcttattattaaatcctggcaaaacaattatttttttcttttcattagtaagacacccaaattaaaactctgccctccggctgcaaggtttacagtagtgattaaaaacaaggaattgtgatgcatggggcttttgacaatggcataatcaaattcattcatattgttcaatctttcactgacaaatatttttacagtgaaatataccaaacaaagaatcacatagaacaactatcaatacagagaaattaggaaaaccttgttattatttaaatagtgaactgataccacgttgtcataatcttgaatacaaacattatactgtagttaattagggtaattattgtctagattgtgcttaattgtcttatgctgaataggacgtatgaatgatgctttttgagctttctataatacctaagtgccgccaaactatttctttataatttaataggttttgatggtatttcctataagtcccaaaatacatctgaatacaagctaagagataaacatgaaccataggccttgacctctgtttcaccttattgaaaaggaggcgtaagagagtcatttagtataccagcgtcacagagcattcccgcaccctgagcacattccttaaaggaaagggaaaaggaaaaaaaaaaaaaaaaacagagtctttgaagtgaatgaaaaattagaaattcaagtgaccacgatcaattctgaaacactgcacaaaattaattacagtttggcatcagaagcaagaatgtagatttcagacagtcggtgtcatttatctcgagccgcacaatatacaaagcgattaaaagccaaatctgtccccacctcccaagtctaaggcctctcagaggctgtgaagtacaaatgattaactccaaattatgcgagggactgggcagccgcttcagcttgaatggagtgtgtggcaagtcgcagacgctggagaaggacagatttgcggctttttatcaaaatccagtctggccaaccattgacggactccagataaattacccagggatctgacagtggctgcagaaagctggctcggcaaaatccaaatctctaatttctatctgtttttaattgcttgccttaaatttgcatttggtttaaaggatttattctattctataggctactctgaccaaattgctttctatttcacatagagttgcaggaacctgtcttaggaggcggggaaagatgtggctttttaatcacttttaatatgcaagttcagtgtcttgaatacacctaggctagggagatcccctgccctctctaaatcctgggattagtccaagaagctatcagtgcccaggtgctactcagacgtcctcggcctctcctacccagaaaaaccccacagagaaacccagccataccctccttccttcatctggggccccattctcattagcccccgttagaaaaggcaggacatgcgtgtgttcaaaatacatcttattctgttgtcaaaactcactcagtattaaaaaggctgacagattttccctacaccaagaaaccacacatgcagtgtcacacacacacacacacacacacacacaagctgggtgcctgcttcatttaaccttgcatttgtaaccagtttattaacacgaggattgccaagtgaaaaactgtcattttaagatttgcaaattgagcctcacctcacaaacccttagattctgagcaattggcttcgggtttctgggtgaaaccagggctgccctcaccagctgtgattgactgagctgtacctgacttaacccaggttctctcccacctgcccctactgaatactctccaccctttcactggggatttcttaaacacagctggagatatcgcattgcagaagcttccctatggcccagtgcttcagctaagcaagtctatttatcccattggtctcagacacaaatggctactgatccagggaggttgcacaggacggagaaagactgagcttgaggaaggtccatctcccatttccctccatttcatggaaacagacatttcttcatttcctgcagcaaaaaaacaacgtaagcacaatagaaacagcaactgggctgggcgtagtggctcatgcctataatcccagcactttgggaggccaaagcaggtagatcacttgaggtcaggagttcgagaccagcctggccaacatggtgaaaccctgtctctactaaaatacaaaaattagccaggcatggtggtgggtgcctgtaaccccagctactagggaggctgaggcagaagaattgcttgaacccgggaggcagaggttgcagtgagctgagatcaaaccactgcactccagcctgggcaacagagcaacacactgtctcaaaaaaaaagaagcagcaactggccctctgcccagtgtcagagacactagggagtggtggggactgtggctaactttaaacgcctgatccttctgaaggaggcagctgcgtttctactcacatacatgttaccgtaacgaaaagaaggtccacgttgccagatactctgaattttcagcaaaatctggattctttccaaaaatttaaatgttgattcacattttaaaggcaaatagaagaacactctactgggcaaatataaacacttctgatggccacatccaatccggagcccccaatttatgacctcaggtccttatttttggtgattgtcattgtcaaatggctgcaaagagacatctcaggattccaaagggcagattacccccttcaacacttatgatagaagcatgccgtaacagcggtgcctgaattcctccttgtcttatgcttactgcccccaatggcctcatcttggagtgacccctggtgccataaccttgaacaacttaagggctttggtccagctcagggtctatctccatggcactttcagtctctggaagcagccttgactcacttttttttttaatccttggacttttagagaagttacacaaatgcctaaaaattgtgagtccaggatgtgcaggcaaaggccaggcatggtgactcacacctgtaatcccagcactttgggaggccaaagtgggtggatcacctgaggtcaggagctcgagaccagactggccaacatggtgaaaccccatctctactaaaaatacaaaaaattagccaggcatagtggcacatgcctgtaatcccagctactcgggaagctgaggcaggagaaacacttgaacctgggaggtggaggttgcagtgagccaagatcgcacgattgcactcctgcttgggcaacaaaggcgaaacccagtctcaaaaaaaaaaaaaaaaagatatgcaggcaagtttgctggtcccagcccaccctgctttctgcagctccaggctggatcatctccagctgagtgcaaacatcagcttccacccacacagtccccctgctcatgggtcctgggctgcatttttctccagaccgacttcccactgctgtgatcagctcagtggcatctattagagagagaaagatgtgctctgctactgtagggtaccctcaagctgcatcctgccaatgcccatcagtaagccttacagagcgaggaggaaagagagaaggcactacgctggggccccaaccaaatgcctccccaaagcaaccaataactcaccactgattactagccaaggaaacactcagctcccatactgtggcagctccctgtcttggctctcctgactgcaaatgccatgacagtgaccactgcatccctttatagcaccctgggcttgcactggattatttatgctgaggaagtgtggccaggtggagggtgcaatggatgtaaaatcagaagcgcgcagaggctgtagcacgttcagtaagtcataggaactcagagcttctgtttaagcatctagaaatagagtttatatcacccgccttacaggtgctagatgaagtttttttcttttagacaaggtttcactctagagtgccatggtatgatcatagctcattgcaacctcgaactcctggactgaaacaatcctcctgcctcagcttccctagtagctggaaccacaggtgctcactaccatagttggctaatttatttttgtttttagtagagacagtgtcttgctttgttgcccaggctggtctctaactcctgggctcaagcaatcctcctgtcagcctcccaaagtgctaggattaaaggtgtgagccaccgtgcctggctgatgctggaagaattaaatttgcagtttatatatgtcaaatcatcatgtaaacactatgaatgagtctcttttttcagggttatgtggctgctctgtgcacaatgcacagtgactggtgtcagccctgcgtctcaaaactcccaccccacggcagcaacatcttttgaaataaaattggtggaatattgtttctaggaaactcggtttataatagtttcaagatgcatttattcaaccatgggaaaaacataagaaaataagagtgcatggttcctaccctcaaggagcttccaatctatttgcaaggcagagatggtggtggaataaagtaggtagttgtagtgaggtccagacatctgaaaagttgagtcccacaggccaggccaaagtcataacctggtttgtcttccccagccctgagaaacagttttctgactgctcataccagaatcaaaacatacagaatttgaatccccctgaaaataaacactcaccttcctaaaaacagagacttgagcaggaggtctctcttgctatcacatcccaaggtgtggggaaaaaatgcaggtggttttcctgccctacagtgagtcccccaccagggtcaggaaatgagatgacatttgagaaagggtcttatcagccgtcatctttattccagcattgtcttcatcaaaagtattaaattcaataagctcaaagtattagagagaaaacagaagggttggctttgggcatctatgaagcagaaagcttcaggtttagcaacttaggaaattatctttgtaaaatatcagaactttgaggagttcaggcaatatttatcaatagcattttttcactctgcattcgtgattcgagctgcaagactccaccatgtgaagttagcagaatgtctgtcttgctgttctgaacacaaaattggagtcacagacattcacatcgacacctcgaaactaccactcctgagaggccaggatgccacaaatcaacctgaataaccaaatcctccgagagagcaaaaaacaaccttcccctgcctcagaagagaccagcgcccagttcaccctcttcagaaataccatttgtacttttcagaatcagaatgtgaccttacaatgaggaaacaaaggatcagagaggtgaaaccacttgcagaaagactcacagcaagttagcgaccaacctgagaccaggatgccaatctagggctccctctctgctcctgcaaggtaggggaactcctctattgactcttgaatatctccacgttcatagggggctgttggagaccttggagaaggacaagttcagctgtcctcaggcctgagagcagaacctgctcaattgtcattcctgagcttcccccatgagctcacgctacagatgggtgcacatcagaaccgcacatcagaggcatgcaaagtcatccactgaggctagcaggggtaaacacataaaaaatgttcacagggccttcaggaaggcacggatgaaacaaatctcaaattgcaggagaactttccaaagcataaccatccaaaggatgtggtgtgtacatggccatctcagaaaatttcaacagaaaaggaggtatcatttaaattagaagggggtacccaaagaaaatgttcacagggcatgtttcattgactctgtacttggcagtggaccttagagagactctgacaataacaatgcacattgcatggttttcatttcagattagctattggatacctcacaacccaaagcttagtcttctcagagaacctccatagccaacagcaatgcatcatattgttaaatgaaagccaaataagtttcattagaaaaggcaatgagggagctgggcacagtgctcccacctgtaatcccagcactttgggaggccaaggcaggaagattgcttgagcccaggggttccaggccagtctgggaaacaaagtgaggtcctgtctctacaaaaagaattaaaaattagccaggcatggtggtgtgcacctgtagtcctagctacttgggaggatggcttgagcccaggaggtggaggctgcagtgacctatgattgagccactgcactccagcctaggcaaaggagcaagatcctgtctcaaaaaagaaggaaaggaaggcagggaggaaggcaggcaggaaggcaggcaggagggagggaggaagggaggaaaggcaggaaggcaggaaggcaggaaggcaggaaggaaggaaggaaggaaggaaggaaggaaggaaggaaggaaggaaggaaggaaggaaggaaaatgatctaagggtcacagtgggccaccactaataataagtcaggattgtgaggcaaggtggtacagtggaaagagggaaggcaaaagtccctattctgcaactaacactagacaagcttctccttagatctcaatcctcccagccataaaatgggggaggaaataataccccttctatcattcttagaaggttggtttataggctcaaaagaagggatacaatgcacatgcataaggctttactgctgagatgctggccctagggactagcaaatgtatggacttgaccctcccatgatgtgagtctttttttagttgttggagtctcactgtgttgcccaagctggaatgcagtggctactcagaggcatactcacaactcactgtggccttcaactcctgggtgcaagcaatcctcccacctcagcctcccaagtagctgggactacagaaatggaccaccacagccaactagtttttttatgaatattttttgtagagatggggtcttgctatgttgcccaggccggtctggaactgctggcctcatgcaatcctcccgcctcagcctcctgagtaactgggaccactgggaccacaggcacatgccactgcattctgcttaaaacagtaacgacatgtataactgacttcaataataacaacagctaatattattattaaagagctcactccaagcccacatgtggagagagagaatttctgcaagtcagggcaaataaagggttgggtcagaggcctcgctgatggctggaacggaggaaggagagagttggtgggcgctatcttacccatttctctctcctaccctggaagacgaaagccctcatagagaaaagccaagatgccccagctgactgcctgccagccaatcccagacgtgccagggaagccaacctagatcacccagctgcccattaacctgccagctgaatgcacagcaagcccagcagaaaccagccaaagggcccagacagtagcagtgtccagccaaactcagagtggtagttcctttaagtccctaagccttgagctggtttgttatgcagcagtagctaagacaccaatcaaacaacctccttgtacagataacaagaccaaggcccaggaacatctcctgctgttccctctgcagcctcagcctatctgatccatccctctctctgcctccagagcgacagttccaaatgcaaatttcatcaagtctctgccctcccaggacccctacgtggctccccagggtcccacagaactgctcaaactcctcctcacctggcagccccaggccagccttccacccacacctttccatatggattctctggcactccccagaagtttgtcgtggtgctgcccaaaaagagcaaagtcccccagaacaccaagccagctatccctgctctcagctggcagcacctctccctggaccggaatgccagtcctccggccacccttgccctggctcacggcttctgagtatcttcctgagcatccactctgccctggagctcagtcccctgagatctggggctcttactcaccttggagtagtccgcagagcttggcatgggccctggattccctgggcgctgctaagtctccaccatggctgctgcagccactgctggtgaggcatggtcaccccagcctcaccccagggggagagttcaggtcgcgtgatgagacggaaggagcactgggttcaagacatgccccttctacttgccaccatgtgaccaagaggcaggtgatctaaacggctcagaggcttggtttcctcatttgcaaaatgaagctgataattcctgccccattcacagggacgctgactgtgaaagccaaaattcactggagactcatctgtgccaggtgacctcttagtatgccagccacccctttcactaaatggcaggaatgtccgacccttgcatggcatatccacccaaagccatttctgccactgtgcaacttgtgttataccataaacattgttctctctctctctctcccactgggaaaggccatcccagcatctttgaagtccccactgcactgggcaggatatctggggaaatcaggggttctgtcaaattggcccatttcacagatttcagaaatctttaaaaccacacctctggtcatagggagtgtgtgtagtgatcctaaaaaatttaaaaaaaaaaaaaaaaaaaaaggtctggaagcagtggctcacacctgtaatcccagcactttgggaggccaaggcaggatgatcacttgagcccaagagtttgagaccagcctgggcaatgtagcgagaccccatatatgaaaaataaaagaaaaaattagctgggcatggtgatgtgtacctataattccagtttctctggaggccaaggcaggaggatcacttgaacccaggaggttaaggctgaagagggctatgataaaaccactgcgttccagcctgggcaacatagcaagaccctatctctaaaaaataattggtcgagcatggtggctcaagcctgtaatcccagcactttgggaggccagggcaggtggatcacctgaggtcaggagttcgagaccagcctggccaacatggcgaaaacccttctctactacaaatacaaaaattagccgggcatggtgatgcatgcctgtagtcccagccacccgggaggctaaggcaggagaatcgcttgaacctgggaggtgaaagtcgcagtgagccaagatcgtgccattgcactccagcttcagggaccgagctagactctgtctgaaaataataataataataaaaataattttaaaactacctgggcatgcttgcatgcacctatagtcctagctacctcttagctagtcaggaggctaaggcacaaggaatacttgagcccaggagttcaaggctgcagtgagctatgatcacaccactgtactccagcctgggtgacacagtaagaccctgtctctaaaaaataaaaataaaatttaaaagatgacctgcgctaggcacagcctgccaacctgagtggctcagatgacagccctccctaggaagtgaaggttgaaagcagaggcccccagaccccacctgcatggcctgtgtagtctctacacctaagcttcacttcctcaccttcgaccacatgcttggtgaaatgggaaataggagaagctgctttataaaaataaaaatgaaaatgcaattgtctgaccaataaaaagcattcctgtatgtaatcccagtaatagattttttaatcctcggctgacacactgttatgtgttcacagttattatctgtccacttccaaaccttaagaggttagattgtttaaagatttgttagctatgaactgcttaaagaaggcgaagtataaacttctagctaattgaaaaatagcattttatcagattttcctctgatattatattgtaatggttgtacttagagcactctcaatacttcaataagtggagaaatttaaaaaataacatcttcagggctttgcagaaaatgtggctgttaccaatttatactgcttttttaaccattattttcttatatttcccacaatgctttggatcagaagcaaacagaaactgagtgattaccccaaagtgtgctagatgaactggaaaaagtctattcaaacaaagctcattagttctgatacctccagggctatgacaaattaagcggctggtgagtgcgcttgcacacaaaagaatggtgccgaaaactagggctgagctaggcgctgtgtcaataaattcccctgaaaaaggtaaaaattacaattggagttaaaatggaatccctttaaggagcatgtacaaaatagatcatcccttctttcttaagtacatttgtgaacccgcccgtgatgaattattgcagcccgggaagtggccactcaagaggggttgcttggccaggtgcacatcggagtcgtgggctgctccaggcttccacctcactcctctgcaaagacttggccctgctgggaggaaagtgttttagagcccaacaagcagagcgtacatgctcaaagacggaagtcccggtctgcagctttgcctactgggctccaggtgaggggctgcgctattcccaaagccaggtgggcagcctcccagctttgaagtgctccatgaccttgagatcaccttgttttctcagccaaaggaggactgtgcattgtaaccatgggatctctttttcctggtttgggaatcagtgtctatgagggttcatagaaaattcttaaaagtagttgtgcttttaacaaatctgtcgcctagaagcttaaataaatattacagcattggataatgtcttttaataacgaataaatattattattagacactggagactaggaaaggtaagagggtgggaaggtgggaggcggtgagggatgagaaattacctgctagatacaaatgttcacaattcaggtgatggttacactaacagcccagacttcaccactaggcaatatatccctgcaacgtaactgcaccttctaaatctaaatctttgtttcgttttcttgttttttgttttttgttttttgtttttttgtttttttgttgttttttttttgagatggagtctcgctctgtcacccaggctggagtccagtggcacgatctcggctcactgcaagctccgcctcccaggttcacgccattctcctgcctcagcctcctgagtagctgggactacaggcacccgccaccacgccctgctaattttttgtatttttagtagagatggggtttcaccgtgttagccaggatggtctcgatcccctgacctcatgatccgcccgcctcagcctcccaaagtgctgggattacaggcatgagccgccgcgccaggcctctaaatctattttttaacattttaaatgttgaattaatgagcaaggctttagggtaagatcacaatatgagggaaggagggtatcaggactggatgcagattctacagatggtccttgggttctctggaagacatggtggccacacatgcccaccagactaaggcatctgtgggtgcctcacagtgctccgtgacctcaatggcagaatttctgtgccacagagaatcttgacttaacaatgattccctggctatccaagtggggaaaaccctctgagagcacccagtccctagaggaacaagggccaaattgaacccacagaatttttgccccatacagtgttgtttttcctctttaatggaaatatttgccacttagaaatcagaaatttcccacaaatgttcagattcccagctcctttgggaacttgaaagatgtagccaaaatggacccatattgccacacagcagaaatgtccaggcagcatcgcagatgccccatttaacaaacacacacactccagcctcggggggccactcccagcccacagcacacaggtattctaacatcctggcccctgaaggtatctgagttcacagcctctgatctggtcaatcatcagtctagtagacatggagaaaataagacccagaaagcaggggtagcttgcaggggctacagtgggagcacagcttcaggactagacttcaagtcttggcatccccagtgccatgttcactgaagctctccaccatcctagccccagtggagtgaattcctctctcgtttgtgtctacttctctgccatgttcagatttctctcaatccccctatctggccattcacccatccaggtgaggtaccagactttgggctagactctgtcatgtaatcatctgcttagagtccatctccaccactgtctatgagcaatttgaggatgggagggatgtggtaatgatctctatctgcagtgcctagcacacagtaggtctagcaaaatcctgcctccttttcatcaagcaatctcatggcatccttcagactctgcatcctgaatcttgatggccatatacaataactaagcccaagaccaccatgaccaccagtctcttcttcaacacgtgaccaatcagccatctcagaccacacatttctgacacaggcctctatattctggccttccttaggtccgctgaggtcactgagaacacctggtggccccagaaggttcattccctccaggtaggtagggaaaggacattctttgtggacccttctgctttatgtttatattttattttatttattttattttattttttgagatggagtctcactctgtcgccaggctggagtgcagtggcacgatcttggctcactgcaacctccaactccctggttcatgcatttctcctgcctcagcctcccgagcagctgggattacaggcatgtgccaacacgcccagctaatttttgtatttttagtagagacatgggttcaccatgttggccaggatggtctcgatctcctgacctcgtgatccgcctgtctcggcctcccaaagttctgggattacaggcgtgagccaccactttatgtttatttttacttacatttccggaaccagtgacatggagggacaattcttcccacgttgatgcatgctgtcgcctaaacatgaactgtttttgcaatcccgcctcagggagtcatagctgttgcatggaggcatgcgattccaaggtccaaggaccacaggggaggcgagggtcaggggctgcaaagcccatgaaggaaaacagcaggtccggacctctgtgctcccccaaagcccaaccgcctttcactgcgcaggtagctccaggcatggcatccgctgctgtagagaagttacaaacaagagcacaaaggcatcaagttttttacttttgtctttcttcctttttttttttttttcaacagagtctcactgtcttgcccagactggattgcagtggtgcaatcatggctcactgcagcctcagcctcccaggctcaagcgaacctcccgcctcagcctctgggactacaggcacacgccaccacactcagctcatttttttattttttataaagatgaggtctcactatgttgcccggggttggcctcaaactcctggcctcaaagaatcctcccaccttggcctcccgaaatgctaggattacaggtgtgagccaccacacccagccatctttcaaaagttgagaagcgggtgggaaaacattaggagtcacatacaacccaggtgctcccatcactcaatcaatactgattgatcaaaggggagaacagtacaaagtgtgaggctggtagggctgtctgaggacacctgggtcccatcccccaacttagcaggatccaacattatattagttcattttcatgctgctgataatgacatacccgagactgcataatttataaagaaaaagaggtttatagactcacagtttcatgtggctggggaggcctcacaatcatggcagaaggcaaaaaggtatgtcttacatggtggcaggcaagaaagagattgtgcagggaaattcccctttgtaaagccatcagatcttgtgagacttatccactatcacgagaacagtataagggaaaccacctccatgattcaattatctcccactgggtccctcccacaacacttgggaattatgggagctaaaattcaagttgagatttgggtggggacacagccagaccatatctaacatcctgcggaactccctgcaccactaggctgggagggaaaggacatgtttgatcacgtggggaacaggtaggtctgaatcagcccctctcagttaccccatgctccagagctgtccaggaaaacaaccaacctttcccctacacctgggaagaaggtgcaattggatgggagagaaagcatatggagctggggcgccaggcttcaagatgcgggccaggctcatcttgtatatttattgcagcactatttacaatagcaaagacttggaaccaacccaaatgcccatcagtgatagactggataaagaaaatgtggcacatatacaccatggaatactatgcagccataaaaaagaatgagttcatgtcctttgcagggacatgcatgaagctggaaaccataattctcagcaaactaacacaggaacagaaaaccaaacactgcatgttctcactcataagtgggagctgaataatgagaacacatggacacagggagagaagcaacacacactgaggcctgtcaggggttgggggacaaggggagggagagcattaggacaaatacctaatgcatgtggggcttaaaacctagatgacaggttgataggtacagcaaaccaccatggcacatgtatacctatgtaacctgcacattctgcacatatatccaagaacttgaagtaaaattaaaaaaaaaaaaaagatgagggccaggcaggggcagacatgtcatggatgtgggaagtcataggcagcagcactgaaggacccctggctggccctagtgcctgtgcacaagccacgccctccatcccacggagaagaggggtggggaatcctcacctcaactgaggaacctccaattaactgtgtttccccagaacggattagattgagcctctaccactgagcacacaggggtttgaaacagagactcatctgatttacagaagcataaagaaagttgcagtatttccgcacctggtacctctgactttgtcaccgccacacagtatgctggaaagcagcttccccaggagtatcccccctcccctgctcaaccctggggggtttagaggaagaaggagaacaggtccagctgctgcctaaaaattcctgggcatacagaggtcagtgtagggggaagagggcatcctgagggcagggcggcagtggggcaactgaaaggctgttttctggtttgtccacaggcagggagtaggaagatcctagtggcagaagcctgctggcatcaacagcctggcaggggctctctgaagcctagcccacccttagtcagaagcgcaggaatggctgtgatgggactgaagcattcatgatggccccaggccagagacatcccggagctgagctccccagggctactccaggcctgggccaggtaagcagatgagtagactcaggggtcagcaggcacacagcaaaacaggggtccctctcctctattgcacagtgcttcctcctctccacccccaatgcccctcaagcccttgccatctcaattctccttctcgttggattctggggtccttctcctctacttcccccttaccccttctcctgacaatcccttctcatgcctcctaaatgtagaatttcctgaggttctgagctcacctgtcctctctctcatgtctcttcccagtgaccttgtgctcacacctccagggaagtgacctccacgtgtccagttcccaccccagcccctatcccaggctcagcttcccactcaggggcccactcacactctgatgcagtctcagtgtctccaatctattcccaagaacaactcatctctgtcatggtccccccactgccccaaggaggtaaggccaggagggaaggcacctgcgttggggtgttggggagtgtgttgtggttggggtgttggggagtgagccttctccacacatcctgccgtggtgttttcacaatcttttgctaatgtttcattcatatatatatatacatatatatatatacacacacacacacatatatatatatatacacacacatatgtatatatacatatatatatatatattttttttttttttttgggagacagagtctcactctgtcacccaggctgaagtgcagtggtgcgatatcggctcactgcaagctccgcctcccgggttcacgtcattctcctgcctcagcctcctgagtagctgagactacaggcgtccgccactacgccctgttaattttttgtatttttagtagagacggggtttcaccatgttagccaggatggtcttgatctcctgatctcatgatccacctgcctcagcctcccaaagtgctgggattacaggcatgagccgccgtgcctggcatttttttttttttttgagatggagtctcactctgtcacccaggctggagtgcagtggcatgatcttggctccctgcaacctctgtctcccaggttcaagtgatcctcattcctcagcctccagagtaaccaggattacaggcacctgccaccacgcccagctaattttttgtatttttagtagagatggggttttaccatgttggccaggctagcctcgaactcctgacctcaggtgatccacccacctcagcctcccaaagtgctgggattacaggcatgagccaccacgcctggcgtttcttcagtatattatcaccatgccaacatggtacccttaaaaaggggccctaccattgcaaacaggggtctctgttggagggtgtgcttaggagaacgtcgctccctcccggtgtgcctctctgtcacctgccacatcctactcatccttcttgcatctgctttaggcccctccttcagaggagcctgccctgaccactgagaccaggtcagtctctctgctatgtgctctctttcctcaaaatatttatcataattcaattaacgatctgtgcgataattaatctaatgtattccttctctcctgctggattgcaggtttcatagcagaagcgataggaggctctcttactagcatggtgcttgtacacagtaggcactcaacaaatgcttgaaatgagagggcacatttcttcatttttaatagatgcttggtgggaactagccacatgtgattggaatttttattatacaccattgtgataaatttgtacccaaattacctattcagtaatctaacagggtaaacatatagtccctacagcttctagaaagatgcctgtgcccctcaccaaggaaaacagttaagccgtccccctgctcaacccccacccccaaagaagagcccaccaaaggccaagcctcctaatcgaatttagctcttgtacccataatcccagcactttgagaggtggaggaggtaggagttcaagaccaacctgggcaatatagcaagacgccacctctatgaagaaaatttaaaaaaaattagctgggcgcagtggagcacatctgtagtcccagctactcaggaggctgaggtgggagaatcttgtgagcccaagagttgaaggctgcagtgagctgtgatcacatcactgcactccagcctgggtgagatatagtaagataatgttgaaaggtagagggaggggggagagagagagaggggaggaaggacaaacactagtaaatagagagagagaaaagagaaggaaggaaagaaagaaggagggaaggaaggaaggaaggaaagggaaggaaggggaagtgaagggaagggaaggaaggaaggaaggaaggaaggaagaaggaagaaggaaggaaggaaggacaaacactagtaaatagtccagaaccgttgcccctgagcttcaagatacctgagtgcttgaaatatagcaaatccactctactgcccatcactggtaaaatgcggagaatgacccagctggccccagagagccccacatggctggcactgagcacttcctaataagcctgtccttctgatcagctccttccctgcacatccacccatcgacatgacagtatcttggaaatgtggagagttttttcatggcacaagtaatagatgcttattcttgagaaatgtgtacatatggataagcaaaatgaaaccacccacaatttcacctttcacctaaaacaccatgactgttggcattttggtggactcccttcccactttcctatctgtagcctctcaattggctccttctcaataagctctacattttgaggtgcagggggttcatctcttctctagctgcactcatgcccttggcacctgcccgatccccttgcttcagctattagctccctgttgccagttcccaggtctacatctcagcccagcctccctccctaattccaggctctaagctcccagtcatcgccacctggatgcctactccatgtctcaaactcagtatgtccaaaaatgttcctccaaagctgcataaaataaaaagtccaggataaacaaaacagcaaaattttaaatcaagacaagacccagccctgcactggcacgtcactctcttcattttaatccccacccttttggattctgtctttatttagaatgttgatattttgttcatcaagagtttttgcattaattttcactttttaaaatattgcattaaaatatgattcagctttatggctgagttttctggcacacctttaaatggtgcacctgaagtgagtgtctcactccccaacttctaatcccaaactcgcccccccacttcttggccaccactgtacaaccaacagcccaggcacacacctagtgtctctggcatctcaagtcacttctagacttacaggaagcacctcatctctgagtatggagccgatgttctgagaagctgccaaaagtgatacccagaagatgcaatgcaaaaatgtggggaaggtactccccacagagtgaactgtgaccagggggaaaggagaaaagggaaggagccaggcacactaatttctcttccctgtcacccaccgactacttagagacagagtttctgcacacacccgatctggagaagatggagacgccaagcagaggcacctgctaagccacctgctgtgtctctccccagccagcatggggcaggaccatacacatttcttcccatccctctatgcttcatgcctcctctctctttcccccttctctctctctctctctgtctctctctctctctctctctctctctctctgcctgcagtttgcacctcccaaatgaagcatcagccctttaatccttgcctcaagctctgttttccagagagcctgagctatggcaggtctgcttctggattttttgtgtttcgtcatcttgatctattttgtgcctttaaaatgcattttcatatctaatacaaattcttcatcattcttccccgccccccccaaattcccttgcctattattactcatttaatcatccaaatgaactttcctacagttaaattctgggagaaagaaatcgctttctatttttcaagtcatcttcgcatttattatcttttttccatgcaacacaaatacttcttaacagtttggatgttagatcggccctgggctctatgtgaccccaagggaattgcaatgtagctggggaattaaagagaatagtaaataaccttgatttaagccgtcagggtaggtgtccctattcccagttggtatagaactacacagctgggagaggctgagttgagattagagtcctggtctctgtgatccccaaagcccatcctctgtccattcaccagcctggaacactgaagaccacaaagatcatgagcactggatgaactcagatgaaggagaactcgtgggtggtgggggcaaggtagagggtgacatgccagagaggtcttcaggaagcttttttttttttttctttgagatggagtctcactctgttgcccagactggagtgcagtagtgtgatcttggctcactgcaacctctgcctcccaggttcaagtgattctcctccctcagcctcctgagtagctgggattatagtcatgcaccaccacgcctggctaattttttgtatatttagtagagacggggtttcaccatgttggccaggctggtcttgaactcctgacctcaggtaaaccacccgacttggcctcccaaagtgctgggattataggcgagagccaccacgcctggccaatcttcaggaagctttaagcttctagctaggatttaaggaaatgaagaaagagaatattactccaaggagagagaacaatacctgtgaaagatcccagaagcaattggaattggagtccaagaagaaccctaaagcagccagaccccacagggcagggagagcacacggcagtgggctggggtcacctgtggcttcctcgtgcctgtgcaatgctcactggtgtacctgagaactttcctcttgacagcgtaagaggcctcaacctgtcccacaaacttagcttggcagcctgtgtttcctggccaaaggcatccaaggagatgacccaagaccaggacagtgatgccccacccttgttttctaggattttaaaaattgtcttcaaatgttcaattgttcttgaaattctcaaaagaaaatttggcttggaagtaatggtagtggtctttgtgcttcttaaagattcttcaaccaaagtcaggcacagtggctcagcgctttgggaggccaaggcaggaggatcacttgaggccaggatttcaagacaagcctgggcaacatagcaagaccccaaaattttttaaaaattagctgggtgtggtggctcatgcttgcagtctcagctacttgggaggctaaggcaagaggatcacttgagcccaggaggtcgaggctgcagtgagctgactgcaccgttgtgctccagcctaagtgacagagtgagaccccatcttaaataaataaataaataaataatattgtttttctggaaaactgctctttcagctttttctttttttattttttttttattattatactttaagttttagggtacatgtgcacaatgtgcaggttagttacatatgtatacatgtgccatgctggtgcgctgcacccactaactcatcatctagcattaggtatatctcccaatgctatccctcccccctcccccctccccacaacaggccccagtgtgtgatgttcccctccctgggtccatgtgttctcattgttcaactcccacttatgagtgagaacatgtggtgtttggttttctgttcctgtgttagtttgctgaggatgatggcttccagcttcatccacatccctgcaaagaacatgatctcattctttatgtctgtgtagtattccatggtgaatatgtaccacattttctttatccagtctatcattgatgggcatttgggttggttccatgtctttgctagtgtatatagtgctgcaataaacatatgtgtgcatgtgtctttatagcagaatgatttatattcctttggatatatacccagtaatgggattgctgggtcaaatggtatttctggttctagatccttgaggaatcaccacactgtcttccacaatggttgaactaatttacattccacgaacagtgtaaaagcattcctatttctccacagtctcgccagcatctgttgtttcttgactttttaataaacgtcattctgactggtgtaagatggtatctcattgtggtttttattcgcatttctctaatgatcagtgatgatgagctttttttatatgtttgctggctgcattaatgtcttctacctgacttgaaactatactacaaggccacagtaaccaaaacagcatggtactagtaccaaacagacatacagaccaatggaatagaacagaaccgtcacgagtaacaccacagttctagaatcatctgatcttcaaaaaaccggacaaaaacaagcagtggggaaaggattctgcatttaataaatgctgctgggaaaactggctagccatatgcaaaaaactgaaactggaccccttctttacaccttatacaaagattaactcaagatggattaaagacttaaatgtaaaacccaaagccataaaaattctaaaagaaaacctaggcaataccattcaagacataagcatgggcaaagacttcatgatgaaaacaccaaaagcaatagcaacaaaagccaaaattgacaaatgggatctaattaagctaaagagcttctgcacagcaaaagaaagtagcatgagagtgaacaggcaacctacagaatgggagaaaaattttgccatctacccgtctgacaaaggtctaataccaagaatctacaagtaacttaaacaaatttacaagaaaaaaacaaacaaccccatcaaaaagtgggcaaaagatatggttagggccttattctaatgcaatggaaagctgccatggaagggttttaggcagggtagtggccggaccagatttctgtttaaaaaatcactctgggtgctttgttgcaaacattctgcagtggaatcagggagatgcacaaggaggctgatggagcagttcaggtgagagattacagcagcttggaccagggggcagtggaggtggagacaccgactgagttagcatctgttttggaggcagagtcaacacagttacaggttcagaagttaagggaaggaaagaaaattaagaatgactcctggttcaaccagtaccttctgtgtgcaataccctaaatgccctgcccatagtcacccaacacacctaatgcgctggtggcactactggcctctgggctctggggttgctatgaactgaattctccccctcctaaaattcatatgttgaagccctaacttccaatgtgactgtctttggagatagtgtcttcaggaggtgtattagtccattctcatgctactaataaagatatacctaggattgagtaatttataaagggaagaggtttaattgactcatagctcagcatggctggggaggcctcggaaaatttataatcatggcagaaggggaagtaaacatgtccttcttcacatggcagcagcaagaagtgtagagcaaaagaggggaagccccttataaaaccatgctcttcacaagaacagcatggaagtaaacgccctcatgattcaattacctcccacagggtccctccgcaacatgtggtgattatgtgaactgcaattcactatgagatttgggtggggacacagccaaaccatatcaggaggtaattaaggctcaatgaagccaaaagagtgaggtcctaatcccataggatagaagggaggggggtcaccagaaccccaccatgttggctccctgatcttggacttctgatcttggacagttctgaggcttggacttccaggctcagaactgtgaatttctgctgttctgttgttcaagtggtgcagtctatagtattttgttatggtagctgactaagatggggtcctactgccgtgttgaggtttgccctccccttccatcttccatagcatggagtgttgggggccaaggagaggctaattttaatagaatggaagtcccccagaagccaacagccctggcctatactctccaccttgcagaggggaccctctcacccctcctggttctattgccagctggcccatgtgtctacttataagccccatcacttatgcttacaaagcatccaatgttcccaggagtatcttcactacccatcgaaaaaagaaaaagaaaaaactcctatgccaaagaacctggaagaaggtattagtggtatgaaatattctggattaagacagtaactcttgcaactttgagtcatcctataacctgaccctgcacactgtgcaggtggttggaatactgctttgttgttgataaggcaatccataaacttgtgtgtccacatgcataagacacatgagtaaaagacaaaagccaaaacaaccatgtaggagagtacctctgcctcagtcttttttctttttttttttttttttttgagacaaagtctcgctctgttgccaagctggagtgcaatggcatgatcttggctcactgcaacctccacctcctgggttcaagcaattctcctgcctcagcctcctaagtagctgggattacaggtgcccgccgccacacccagctaatttttgtatttttagtagagatggggttttaccatgttggtcaggatggtctcaatctcttgacctcatgatccacccacctcagcctctcaaagtgctgggattacaggcatcagccactgcacctgaccctctgcctcagtctttagacttgaaaaggtggtctcacatcactggccaagctaactcaggccagttcaccatcctggtgcaagatccaaaaacttcctcagtgttttattgtccaggtttcggcacgatgcaaggctttgctgtatctcgctacctgggtctagctttgtcccagctggggatgtggggatgctgcaggatgtctaatgcaggagtgttggcaccctgtccccaggaggggaccccacttttgtccccttctcctccgtgtccttgccagctcctaagagcaaggaccacagttgactcagacatggccttgactgactcagacagacagcaaaaacgaaacatgagctaaaggcaagaacacagccctgggacccaaataaagacacaattagcaagaggaatacaagacctcgtagagggaataccttgtgtgccggggcttgaagatcaaggtggatttctacaggcagaaaattaacctgtgtcccttttctttgggtctgcctggtgaatggaggctgtggtcacttgaacccatcaccttttcagtatttgccaacatgcatgagctgagagccatccactccaggatctcccgtgatgagtctgcccaaagtcctgggcttccctctccacgtgtgcaactgctgtaagccgctctgctacttgaagagccgggtctctctcctgaccagcagacccctcagcagctgtgcaccatcacagcaccagccccctccccattgtcactgccaagctctccctgagggcttgcctggagccacactgcacctctcaaccctaggtacctgatgtccaagcaggcaactgtaagggaacactgcaaagagagagaaagtggagactccagtctgtccccgacgctgcccaagggaagggacatctggagactggcacagggacatctggagactgacacagactggcccctgcacagagcgccctgagccctacagcttcagagcctcagcatgattctacgaagcagatgcattttcatattcattttaccaggagaaaaccatggttcagagagtcagcataaatccccaaagaggccacacagccataacacgtccaagttgatgtttggctccaagctcctcatggttttcaggcacccagtgaggaatgtacaccctgacattcactcatgcatgtgcaccgagcacccgcgtcagctagtggggctgcacggagggctgtgccctgtcgcgctccatcctgctctcgccctcagaagctagggtgaaccaagagtgcgactgtgattggaagaagcatttgggcatgactactgctacaatgatattacacacacctatgtaggacgacgtcacagtgtcacctgtgctggggaagcatagggaacacactgtgtgttcatcacagtcacagggtggctgcctcttctgtgcactttctcctcgaacccagaccatctcccaccctcatcacagatttcagaccctgaccacccctctggccccaggtagggtgatcaaccacccagcttgcccaggactaagggggttcccaggatacaagctttcagtgttaaaacccagaaagccctggcaaaccaggacaagtttgacaatgctaaaggcaccatattggagaagcccacagtcctagcccaggggcctcatccaggacagaataagagttgcctcaccctgcagatctccacttctgcctgcagcttaccagcaatggccaatgcctcatccttagggccaagcatgctctactgagctacttttcagcttcatgggatttctcagcctcccccacaagcctttcctttttggtttttggggctttttttgctttttggttttgggggtttgttgggtttttgttttgtcttttgtttttttggttttttggttttttggtgttttttttccttgagacagggtctcactctgttacccaggctggagtgcagtggcacaattgtagctcactgcagcctcgaactcctgggctcaggaaatcctcccaccttggcccctcgagtagctgagactacaggagtacactaccataatcggctaatttcttagctttttatagggatggggtctcgctatgttgcccaggctggtcttgaactcctaggctcaaacaatccttccactttggcctcccaaagtgctggaattacaggcatgagccacggcatctggcccaccctttatttaattcaattcaaacactcaatcggctactggatgaccagttaataaagtagatccaaatgttaggttgttcccttaatctgacactgtggcagctagtccccaggttcttgcattcaccatttttctattaataagaaaactttttctctgcctggcaagaatgcgaaagcaagttaaaacctgctaggaaacagaggcccacccataggatggcacgagagaccaagtgagttctaagagatgtattcttatccgagagcccaaagacaagaagcagacacagccacaagctcccaggtacccagcatccttgactttgcattttgactcacagacctacgaacgtccaagacaaagcaggagggtggatcccacagggcataggttctgctcagggtgaccatagcagctggctcagctgccctccctcagcgggggtctcaggaaacactcttgccctaccagcctcctcccagagaagccacggctgtctctgcccttgcagccactgccagccaggaagacaagttctgggcagagagtgagctggaccctagggaaatgaccctagggagattgaggcttcattcctttccaaagggtccagggatgccctatgacaacgtgttcctgctgtaggttatcaatcctagggcacaggttgcccagaggagagaaacagggtccagggaatgttgttttcaaagaaaagatcatgacattgcaaactcatgtttcagcaagggcagcttgcagaatacttagatcagctaaccaccgtcctctctcttgaaccccttctctgtccacggggaggcaatgcccccacgttgctgtttaacattaatgtttaacattagcatcttactgttaatagcagtaagaaatttctgggccaggcacagtagttcatggctagtaatcccagcactttgggaagccaaggtgggaagattgcttgaggccaggagttcgagactagccagggcaacacagccagaccctgtctctacaaaaattaaattaaatttaaaattagccaggcatggtggcacgcacctgtagtcccagctacttgggaggctgaggtgggagaatcacttgagcacaggagtttgaggctgctgtgagccatgatcatacattgcactccagcctgaacaacagagcgagacgctgtctcaaaaaaaaaaatttaaaagaaaaatttctggcccaataacttgatcatctgtgtacatcaagtatgttcacagggttcaaggattcaaggacagaggcaggaatagatgacatggatgcttcctcccagtctctatccctctgaacttctaagccaggaaacaaaaggtgagatgcccacaggaatcaggcaggcaacataaatgcatgatgttagttacatgtaacagtgcaaatcaaagatctgcagtgacagccaatcagcacaggcctgggaagggtgtgtggagagatagttatgactgcaaattaacagcatagccacatctaaaaggagtagcctgacttcacacctctcaattgcggtcaagaagaaacgcccaggtttttctaagagatgcccagaatttggatgtttatgtgcaatcttctgactttgaaatgctggcatttaattcaggttttgttaaaactctaaatagatcccaaaacccacctgggcctgaagacagcctatgtgtcgtctgtctgcagcctctcctcgaaatgtttcactagcacccagagaaagctgacctggctgcaggggccccgggcaggctcaccgctgtcacatcccgggagattccctgcagggaccagggctccccttctgccaggaaagtggcctatacacatgcagcacaagccagtggagatgggcgtggggcccccacttggtggccctgctgtcaccccaattgaaataggtgttcgaacaaattaaactccacaccaaagttctgtttccctgtcgagtcagcacccagttccaaatgtctatgattaacacaactcttaatgtatctttctaaatgtgaaaccattttgtgtgcaaatattgcaggaacaagaattccttggtccagcgagctcgaggcttcctctactggttagaggccctgagatgaaattaccctgaatgcaatcctcttctcctattctttttatcttgagttccaaatgaaatacattgggaaaataagatgtgctgccagcttctgggccaggggcctgaattcttgcaaacaggcatttggctgagggggcatggagcaacccagtctgcctgtaaatggtttgctttggaagaaatggctttaatttactgcaaagtttagggtggccctgcaggtatggggtgctggccccccaaggtgtccaggaagggatggggcagcaaggtgatgtcaagtacaacctcccagctctgcagcaactcaggaccatgagttaatgacagagaagtgtggagagcctcctcccatgtgccctggagcctcagctgctgcagagcctacacagaggtcctggcattccgactaatcgggcattcttcccagttctgctgccagcttgcccggtcagagctgaggccacagaggacccagtattgtcaccagaggcaccctgccccaactctgagtctcttctctctgactctggagctgagccagcgtcttgagcccatgacctgtgcagtactcaggccccacattcctaaatccaggccctgccctggatttagatgctccgctgtcctgtcttgaaattcctaattcattttttaatgaggaactttgtgttttcatttttattttaccctgggacctgccatggcttggagaaatcacactctgattgccatactgctgtggggctcaggtctcgaggcagcgcctcaccccaggagacaccgggggaaggtgagctgacttggagccaccttcccggctgaggaagctgtatggtttgaatgtcccctccaaaactcaagttgaaccttaatcccaaatgcaacagtattgagaggtgaggcttttaagaggtgactggatcctgagggttctgcctttatgaatggataaaagggctactggattaatgcaaggggaactggtggctttagaagaagggagacctgagcatagcacatttgacacactcagcccctcaccatgggacactctgtgccacctgaagactctgctgagagtccccaccagcaagaaggctctcaccagatgcagcccttcaaccttggacttctcatcctctagaactgtaagagacaattcccttttctttataaattacccagttattctgttctaagcaaccaaagacagatcaatacagaaacctcatctcaagctgttcatgcatggctgcagagaactcatcgagggcctagctggagccagaaatgcagggagagcccagagcctgcaaggagggagaaaggcactctccagcacaggcagacacagagctgaaagagcggagtagccaggggctgggtgccatgggcttcctggaggaggaggctcccagatctaggacagaactgaacaagtaaacagggtttggagaagccagggaggctggggtgggggggccagggggtgggcagggaagcaaaaggagaatcagcagggtggagggccctagattgtgccagacaggggccactccagctgctgcaggagtgacttcactcaccctcccggggttatgcacctgccacctcccagacatccccagccccgcatctccctgcacaatgcctgctctgattctccttgcagccagggtgagaggcagtcagcgaacaatgctatctgcacgtggtggcgcccaaaatacggctgtcatttatttcgttatatgaaattagagcacgccttgtagccataatgaatcatttccttcctgcctgggccacggtgtcaggcaggagctcggcatcccccattcagggcctttcacttcatcgcaggctaataataacccacgcgggtgaacacacatcttcccgagacaatggagggcctggatgggcattggggtcatgagtgcagtgcccacagcaggaggggagaagggccgggatggggcctgggctggacactgtggctgaaggaagacagtgcccatggggaggggaaggaaggcatctgggtgggcaccccaagtgggagctggggcacccaggtcccttttctagctgatcccctcaacaaggacaggaaatagctccctcccccaacccccagctattctaccaggattttttcccaatcatgcctaggtccagctcagaggccctaaccagagccctccacagctggcctcactcttcactcagcccccaattttcaaagcactggctccttccacagcttcatcccagccccatcctggcctggggatcccaggagccaccccctgcagcactgtctcacctcacatccctgcctcatgcaggctctgcagtagcaggtgctcagcaaatggatgagtgtgtcctgatggagccaagtccccgggtagctcccgctggggctatgacctgggagcttcatccggccctggacagcagatgcagacccaggtcctgccctatagggcccgccccaccccctaggttaaaggcaagtccagaccatgggaaaaccatcctcccagaccctgtgattattgttcgtctcttatcctgagtataacccataaggcattttattttattttattgagacaagctctcaattcatctcccagggtggagagcagtggcacactcaaagctcactgcagcctccaattcctgggctcaggtgatcctcctgcctcagcctccctagtagctgtgactacaggtgctcaccgccaccacacctggctaattttttattattatttatagagacagggtctcactatgctgcccaggctggtctcaaactgctggcctcaagtgatcctcctgcctcggcttcccaaaatactggggttacaggcgtacatgccctgcctcataaggccttttcatcaccatctccccaggagtaagcacactatctgtcagtttttctgaatgaaagaataaatgaatgagggtcaaaggccatatgctaaatggtatggaggaaactccaggatgagagtgaccagagaagggaggctggtcccgggggaggtgagtagagggaatggcaggcacacctggcccaggagcctttgcctttcctcttctggtttcaggcggctatgagcagcattgcctcttccccatggatgcctggtgcgtacaaccccactaaacggcacttgtgcaccttgcagcctccaattcctgggctcaggcgatcctcctgcctcagcctcccaagtagctgtgactcatctctgcaccctagcctactccgtgctgtgtctctgaagaattctgcccattcctgcctcagggcccacttaagaggctgttccctctgcccagaactgctttctccttcccttctcctcctgatccccaccacgcagcccatgtccttctgtggggaagcctcctgactttccatcctactgagtccccaattacatgacctcacagctcccagcacttatcctgcacctgactacacacaccaggcagtgactagttcctgctgggagatcccatcttgtcaatttccctggaaggatcagccccgtagaaggtggccctgtgtctgttttgctcaccactgcccctcttacaccaaccacaataccagatgcacaggatgtcctcattaaatgttttctgattaagaaaatgaattaatcccataacaagaaactcatcaaatcccaaggcagcccactctactttgttaatagcctgtgttgtttgtctttgtgaaccatggacaaaaaaaatgaaaaaaaaaattcattcctattatttaaattcattcctattatttaaacattaaaattaaaatgcagataactgtattaatatttttgtgtatttccatccagttttctatatgaactttttacataattgagatcctatgtaagaagggattttctatcctctttatcctacaatataataagtgcttgtgaataaaataatgtcttttgcagcaacttggatggagctggaggccattattccaagtgaagtcactcaggaatggaaaaccaaatatcacagcttctcagtcataagtggaagttaaactatgaggatgcaaaggcataagaatgatataatgggccagttgcggtggctcacacctgaaatcccagcactttgggaggccaaggcgagtggatcacgaggtcaggagatcaagactatcctggctaacacggtgaaactctgcctctacaaaaaatacaaaaaattagccgggtgtggcgggcacctgtaatcccagctactcgggaggctgaggtaggagaaacgcttgaacccgggaggcagaggttgcagtgagccaagattgcgacactgcactccagcctgggtgacagagtgagactccgtctcaaaaaaaaaaaaaaaaaaaaagatataatggactttggggacttggagcggggaaaggggtaagagataaaagactacacattgggtacagtgtaccctgctggggtgatgggtgtactaaaatcttagaaatcatcactacataacttatctatgcaaccaaaaaccacttgtaccccaaaaactattgaacaaaaaggaagctttaaaaaaagtgtttatgaaagttggcaaaacttaataaatattattttactgtatcatactttattcttttcttaatgattcccctataaaacacttaagtgttttttcagtattttaagcaatattgcaatgaacatctgtgtagaaaatgttcccattttttaaattgtcttcttagattccatttttgacgtggacacattgggtgaaagctgatgaacattttaaatttcttgatagtatttctaacgcactctttcagaaattctgaaccaattcacaatcctatcaacaaagtacaagtgcctagtttatcacaagcctgtcagcactgactttttttttttttttttttttttgagacagggtctcgctctgtcgcccaggctggagtgcagtggcgctatctcggctcactgcaacctcaacctcccaagcttaggtgatcctcccacctcagcctcccgagtagctgggactacacgcatataccaccacaaccacctaatttttgtttattttgtagaaatgaggtctcactatgttgcccgggctggtcttgaactcctgggctcaagcaatccacctgccttggcctcccaaagtgctaggattacaggcatgaggcatcatgcccagccaacttttgatttttaatctttcctgatttgtcagggaaacaaagaagtattacttagtttcacactccttttttgtgtgtttgtgaattacctatatacatgttttcccaacttcattagatagcctattccatcagagagctctgtctgaagagctttaagctgagccatgaaggaagagaagcatattcatagaaacacaaaagaagatggcatttttggcagcaaactttgtcattaaaaggtactttcctggccaggcatggtggctcacacctgtaatctcagcactttgggaggctgagacaggcaatcacctgaggccaggagttcaagaccaacctagccaacgtggtgaaaccccgtctcttaataaaaatacaaaaattagccaggcggtggcaggcacctgtaatcccagctactcgggaggcagcggcacgagaattgcttgaacctgggaggcagacattgcagtgagctgagatcacaccactgcactccagcctgggtggcagagtaagactccaccagaaggaaaagaaaaaaagaaaagaaaagaaaaggagaaacaccctttttgacaatctcttgaacccaggcagcggaggttgcattgagcctagatcatgacactgcactctagcctgggtgacagagcaagactctgtctcaaacaaaacaaaacaaaacaaaacaaagatgcttcctttgataatatacctctccccacattttcctttctttgtcatagacgagcctgacctcacagccatctgacaacaagagagccaggaaacagtcgaccctatggctcctaagtccataggttctgggcaggcaaagccactcagtagaccaagcctcagtatgaaatgacagcctggaagaccctgacttctgttcctgcaggcagtcttccaccttcacatctgcctgggacactgcagaggcatctctcacccatagatggggcactcagtgctgaagcagacgtctgtcccaaagatccagatcccacccctgcacattttggctgaatcacttcccgtcattccaagcagaggaagatccaaaaattctcacctccatagtttgaacagctaatttgctttttgttcttgttgcagtgagtacattgtcacgggcagaaatgctagctcatacaccaaaaggaagaaaatgtaagtaatccctaattctagcctttgttctacatataggtaacagagatcatatttttaaatcattgttcaatatattcgcatgctctgtaagccatggtttaggaggcaggaagattgatgttttaggagaacagatcccaccaaaactggggtttccaaaacacgtgccagagccctggggcatcaccatgggctgttttaacatttttatttttttttttgagatggagtttcactcttgttgcccaggctggagcgcagtggcacaatctcagctcactgcaacctccgcctcccgggtttaagagattctcctgcctcagcctcccgagtagctgggattacaggcgcccgcaacaacgcctggctagttttttgtattttcagtagagacgaggttttgccatgttggcaggctggtctcgaactcctgacctcaggtgatccacctgcctcggcctcccaaagtgctgggattacaggcgtgagccaccgcacccaccctgtttaaactttttgaaagaaaccagcaacaccagtcagacaccacgcaaactattactgttatgtcgtttagacctaactaatgaaatgttaggctttgggggaatttgttttgtgtatacaatgtttccattttttaaattatcttcttagattacatttttgaagtggatacactaagtcaaagtagatgaacattttttaatttcttgatactagttctaaagcactttttcagaaactaagtgctgtgcgggggagaaaaaaaaagctactaagaatgctgtgagaaaaaaaaaaactgcttgagacattaagggacaccatgaactgagaaagttggagaacttctacaccacaacaaggctcagcagtgacttccaaattagatttggaagatcagtagacttaactccaggcttcgttggcgaaaaaatgttctagatttccctcacgatacctggagcatagagttccatccaggcaggaagtggaagaaggaagagcccacctttttttggcccaagggatttgtgggtagaaggaaggcggaggaaggagacacacaggaggcatgtgagtgcccacgctcctctccagatttgaccaagagtaggagacacatgcaccaagtttagggggatgctgaggactcagggagtctcatgcctcatgtttaggaactggaaagaaatgcctttccaggctgtaccactaatctaagaggaagtggccattactgtgcaaattcagcagctctgcatgggtttgcaagtgggatggaaatttactttctcaaactgctctcagtttccatatggcttgaaaagggcaaagaagttctcgaggccccagagagaggaaaggaaggtgaccaagctgaattccagagacctcccataaagttatctgaggcaaggaccaaaagcccaggatccaatggcagcacactgagaaacacggcgtggtctgtgagcaccagcagagacaaaacgaagccagatcagccaaggagcatccacgggtcttgccccaccaggaagttcagactatgtatgtctaggctcagttatgctgcagtaacaagcaaccctgggttccaggtctgtgtgctatccccactctacatccactgaagggtggctggaggttctgcccaatgttgccctcactgagggacacaggagcagcccccatctaaatcataactagtcaccttggcagggggaagggaatcaggagggtcatggaccagcactcaaagacttccacagaaatgtgggtcatcatctcagctcaggcttcactggccaaagtgtgtcacgtggccatgcctaactccacactaatgcaaaagtgcagtcctagcctgtggctagatggaagaagccagaaatattggggagcaacaagtttcagtaaatgtcagcaggtgctagatgggacagtcatgttggaccagccactctgcctcagagaaagcagggattcaaatatttcatcttttcccctttgtcactgagtcctgtgagccccctacccccacacagacagtcatcttcttgaagaaagtccagtgaaaaggacccaagtgcctgccttatattccactttccagattagactaaaatttaggagttttattccccatgggtcttgaagaagacagagcagtttgagaaatgaagaagtcatgtgtttcttacacattgaagtgtagtgttagcaaatttgcaaactcactacacagactttttttacaaaataggatcatactatttatttgcactattttacctgctttgttccattattaatagacagagaatttttttccactaatattcttgaatatttccacagcttcccattgactgtatatgccaggggtctctaagcatgaccttcttgtagggactccggagtcatattcatagcaaaaactcaaatttcattgactcttacacccatgtgctggtgcatatgactcttacacccatatgctgttgccatcatttttaacttattatttaatatttgggtggtttctaattttttatgttaaaaaattatgtcacaatatctggtaaaatgacatatgcatttaccttttgacacagcaatttcacttctaggaatctaacaaaagatataggagcaaaaatgcaaaatgttgaaacacagtgttattcgttgcaacacatttgtgctagcaaaagactggaaacaactcaagtgtctctcaataatgagctagttggataaactatggtatatgcaaaaaaagtagactgctgtgccactttagaaaggaataaaaatctctctatatactgatatggagttacctcccaggtatattattaaacaaaaagcaaggtggaggaaagtgatttttgtatggtttcatttatctaagaaaggaagcaatacacacacacacacacacacacacacacacacagttacttatatttttaaaattaaaaaccaaaccaatactttaaaaaataattgtctgtagattcagaaggaacagaatggagaacaaagggatagaagtgaacatctctgaacattattagtgttattgatttgactttgaacccatgaaatattttacataattttaaacaaaattaggttttttaatcctttccagaaagatgaaacaggcaatactttttcctattcctcccactaaatacaatcaaaaatcctgaacattgtatataaaacaaacataataattctctgaatataaaacagacataagaattttctgaaaaatggaaaaactatggcagagtggttggggacctcaagacccaaggaataacataggagtcagctccttgggttttctttttgcttcatatatgctgaacctacaactgaagaaattagaaatctggaaacaacaatagacacagatgacaaaaacaaaaaacaaaataaaacaaaatgctctctctagccaaaggagcagaaaagaagcagcctagaaagtcagaaaacttttagacagtaaccacactactccagccaaataccacagaaaaaaagccttgtggtcccactccattaaaggcctgatgaagagtctagactctcaccctcgcaaggaaacccaacatccatgctgagctgatgtcagaaaaggccaagtgtggagtctccttccccactggcctccatcccccaacagtatcagtggaggagtagcaggatcatattctctcagatgtcaactgaggcaaagtggggaacctggaggaagattgtatttgtatcagataaaatagaattcagggaaaataaaattcccagatacagagagagacatcgtaataatgataaaagggttaatccatcaagaagacataccaatcctaaatgtgtgtgcaccaaacaaaaaagctgcaaaatgcatgaagccaaaactgatgggaagcacctcccttaccctaccagagtagtagcagaaaaaaaccatctagaccacaagctctaagtaagattcaaagtctcataatataacacaagttcccgtttcaatttaaaaatcactcatgctgtaaaaaggaaggtcacaaactgcataaaaatgacaatcagatgctaacatcaatatgacagaattacgttagaattatctaacaaatattttaaagtagtcataataaaagtgcttgagtgagaaattacaaacacacttgaaacaaatggagtagaaaagagtctcgacaaagaaataaatgacatagagaagagccaaatggaaattttagaactcaaaaatacaataaccaaattttaactcagtgactgagccaaaaagcataatgaaggagacagaagaaaatatcagtgaagtggaagagaaaataatggaaattatccatttgaacaacagagagaaaaaacagactgaaaaaaataacaccacctcagggacctgtgggattacaacaaaaaacataagatttattttatcagagccttgaaatgagaggagaaagaggatgggactgaaaagtactcaaccaaagagtggctgaaaatgtctctgagttattgagacataaatctacagattcaaagagctgagttcacccaaacaagataaatgcaaaaaattccatacaaagacacatcataattaaatttttggaaactaaagacaaatacaaaaacatacaaaaagaaaaaaaagagagagaacatgctagtacatggggaaagcaattagaataacagtagatttctcatcagaaatcatggagaccagcagaagtggcaatgtgtttttcaagtactgaaagaactgcctacccggaatcctatatccagcaaaaacatactttagtaattaagggaaaagcaagacattggccaatgaaggaaaactaagagaagttgtctctagcagacctactctaaaagaatgtctaaagggagttctataaacagaaaggatgtgagaaaaagtcttggaagagaaaaagagagagagaggagaggtaggaaggagaggaggggaggggagggaaggcaggcagacaagaaacaaaaatatgggtaaattaaaaaggctccccttcttttgagttgtccaaattatgtttgatggttgaagtaaaaattataacactttttatgtggttctaaatgtatgcagaaaaatattaaagacaatgacattaaaagtgaggaagataaaaatacttaaagggagataatgtttctatacttcattcaaattgatgagatgacaacagcaggattctgataagttatgtataaataacacaatacctagagcaaccactaaaaaaaattatacaaagagctgactcttaaaaatactacagataaaaatgaattctaaagaaaagttcaagtaacccacaggaagataggaaaataacagagaagcaaaccgcagaacgaaaacaaacaaaaagcaatggctgaattaatatctaacatttcaataattctattaaatgtaaatgtcctaattataccaatttaaaaatatggcagagatggatttaaaaataagacccagctacatgctttctcaaataaactcacttcaaatataacaatataagcaggttcaaagcaaaaggatgggaaagataaatcacacaaacattgatcaaaggaaagcagtacttatattaatatcagataaaatagactttggaacaaagaaaattaccagagtcagagaaagaagatatataatgataaaatggttaatacaccagaaagaagtagcaactctaaatgtctatacaccaaacaaaggagctgaaaacatcacaagcaaaaactgacagagctgaaaggagaagcacacaaatccacagttatacacagttgggtattttaagttccttctctcaacaattagaaaaatcaacaaggccacagaatagttcaacaacactatccaccagcaagaattaatcaacatttataaagtagttcacccaacaacagaagaatacatattcttttcatctgtctatggaatatatataaaaatagattatgccctggtttataaaacaaacctcagcaaatttgaaagaatttaaattatacagagtgtgctctccaaccacaatggaatcaaatggaaataataacagaaagataaccaaaaaatctccaaacacttggaaactaaacaacacacttctaaataatccatgggctgagcaggaagtcttagaagaaataaaagcaaaaatacattgaactgattaaaataaaaatacaacataacagaagtgacagaacacagctaaagcagtgctgagagggaaattcattgtattaagtgtgtacattagaaaagaagaaatttcttagttcaataatctaagctctcacctcgagaacctagaaaagagcaaaataaacccaaagcaagcaaaatgaaggaagtaataaagagtagaaataaacgaaattgaaaacagaaaaaccacagagaaaatcaacaaaacaaaatctttctttggaaggattaataaaattgacaaacttctagcaaaaccagcaaattagaaagagaaaaaaatacaaattaccaatatcaagactaaaagagataatatcaccacaaagcctgctgacatcaaaagaataatagggaaatataatactgtgaacaactttatacatgtaaatttgacaactgaaacaaaatggatcaattccttaaaaacacaagttaccataactcacccaatatgaaaaagataatgtaaatagccctatactgattaagaactatgaatttgtaattttaaagctcccaaaaaggaaatctccaggcccagatggtgtcactgctgaattctatcaaacgtttaaagaagattagcaccattctatacaatcttttccagaaaatacaaaagcagaacacttcttaatttatattatgaagttagtgttacctcgataacaaaagtaaatgactgtgcaaatagaaaaaaaaacaaagctacatgaatatagatgcaaaaatccttcacaaacattagcaaatagaattctgccatatataaaaagagttacacaaaaccacatgtggtttatttcatgaatgcaagacttgttcaatattagaaaatcaaccaatgtaatccaccattttagcaggctcaaaaataaaatcatatgatgatattatttctctgtacaagcagtatacatgtacagacaattacacaatgctgatgaaataaatcaaaataaatggggatatgtaccatgttcatgaaatagaagatttaatataataaagaagtctattctcaaactgatatacaggtttaatgcaattctatcaaaagcccagaatgttttttgtctgtatatatagacaatattgttccaaaatttattttgaaaacaaaggatctagcatagctaaaatggttttggaaagggggaataaaatggaagaaatcagtctacccactatcaagacttactatgttaccatggttatcaaggctgggtggtcctggcaaaggaaaagacatatagatgaagggaacacaaaagagaacacagaaatagacccacacaaaatacccaacaaattttttacaaaggcacaaaagcaacttaatgaaggaaagatagagcctttttaaccaatggtgctggagcaattgtacgtccataggttaaaaaaaaatgaaacttgatctatgtttcacactttataaaataattaactcaaattgatcactggcttaaatgtaaaactctaaaacttctagtagaaaacattggagaaaatcttcagcatctaagactaggcaaagagttcttagacttgacacaaaaagcatgatccctaaatggaaaatttgattaaaatgcacttcaccaaaattaaaaggttttgcttttcaaaagaccatggtaagagagtaaaaagcaagctacacaccaacagaaaatatttgcaatcacgtatctgacaaaggactagtatctagactagagaaaactctaaacactcaacaatttaaaaaatttttaaacaacaattcaactagaaaataggcaaaataaaaaaaacatgaatagacatttcaccacaggggaaatatagatgctaaataaacacaagaaaagttatcatcattagccattagggaaatgcagattaaagccacaatggatattgctacccacatgccaaaatgtcttttgagtgacatcaccaaatgctaatgaggatgcagagaaattagatcacttttacactgttggtaggaaattaaaacggtaagccattctgaaaaacagtttggcaatttcttaaataactaaatatgcaaataccatctaacacaacaattgcaacacctgggcacgtatctcagagaaatgaaaacttaggttcacagaagaacctttacacaaatgcttagctttattcacgatagccaaaaactggaaacaacctagatgtccttcagtgagtgaatcattaggcaaaccgtggtccgtccgtgctatagaatactacgcagcaatgaaaagcaacagcttgaatcatgttcctgagaatgatgcttaggggaaaaagccaatcccaaaaagttacagactatgtgattccatttatttaacattcttgaaatgataaaattatagaaatagagaacagattggtggttgccaggggttaaggagtgatttgggaggaaatagttgtggctataaaagagcaacataagacatcctcctggtgaaggaagttttctgtattctgcctatagcaatgtcaacattctgattctgacagagtactgtagtttggcatggtgttaccattgggggaaactgggtaaagggtacatgggatctctctgtactatttcttacaactgtacatggatttccaattatcacaaaataaaaagattgatttttttaaaataaagatcaaggtaaccaaatagttaacgatgggaaactcctctttaagaactattccggctaatgagttaagaaggggtgatagaatataaccatgttgcagccttaataaaataatagatctagattagattttattccttgagaccaatgggccttctggtcatctgaagagtatggaccccctctaaaaataatgaaatgaagtaaaatgaaatacgtaagttacaaactcttgaagtatgattatcaaaatatttcacaaaaaacaaatttgtgacataacaatagatgtgcatccttatgtacttatcaataacaaattctagtggagggtttaataattttaaagtggagaggagcacaaattatatttcaagatgcctgcaatagctataatgctatatggaaatatctgtgacttctactggtgacatagtcgcaggatatgcaagatacagaggaacatgttaaatggcacaaaaacaatacaatcagcaaaatcaagtctgtgggaaacccaacggtgcaattcatccagccccttcaacaaattccaagggaaaaagagagtgggggaggaaaacagagattaaaagagatgagatgcatcaaccagttgccaagggtggactttatctcattcaaacaaaagaaaaaaagaaagattatgagacaagtaggagaaattaaatatcaactgaatatttgacaatattaaggaatttttgtttattttaaagtgagataaaggtattgtgacttgctttcttaaggagcccttatcttttagagatgccttctgaattattgatggatgaaataatgcgatatctgagacctgcttccaatcacctgggagagaggaggggacccaggagttgacaaccattgaagctgagtaacagggtacaggagtccatttttctgttcatgctacttttacgcaatttttcacttttctataataaaaagccaaaaacaaacctgtaatgagcatcattgtatgtgaatctttgttttcatccaggattaattacctacagacatttcctaatagtggaattgtgggttttaaggatgtgaacatcttaaagtttttgaaatgcattgcttgagtgagctagtggaacagggaaaaatagagtagctcaaggactctcctagcaggaaacaagggaacttaaaaaaaaaaaaaaaaaaaaaaagacatggtctggctctgtcccgcacgctggtgtgcagtggcacaatcatagctcattgcagcctcgaactcctgggctcaagcaatccctcccacctcagcctcctgagtagctgggactacaggcacatgataatttttttttattttttgtagcgacgggatctcactatgttacccaggatggtttcaaactcctggcctcaagtgattcttccacctcagcctcccaaagtgctagggttacaggcatgagccaggaatgtttctagaggtaaggcttgtcttcctccaccctacctctcctcctctttgcccagatgtacccttcctctatggaagaaaccaaattttagccagcactcaaatcctggttctcactattcaaatttctctgtctctggcacccatctgctggatgtaaaatcatgtattcacctaattttggtggtgggatatctgcattttgtctgtttctttcttttatacaagatgttgtaacaacacatctgtagtaaattgctgcggtcatttattattacgtccttgggataaattcctagaagaatctacccaggtcaaaagaaagtgtattttgccctcctagaaactgtttctggttaatcccatcagtgcccagtggctggttcctggcttttaccaggtaccatcaaatttacctgcttaagaccttcagccagagatgggtcaaatttacaaacaaacatcagccaatttggtgggttaaaataaggtcaccttggggcaggcacagtggctcacggctgtaatcccaacaccttgggaggccaaggtgggaggatcgcttgaggccaagagttcaagactgacctgggcaacatggagagacccctctctacaaaagaaacttttaaaacttagttaggtatggaggcacgttcctgtagtcccagctactcaggaggctgagatgggaggatcacttaagcccaggaggttgaggctgcagtgagctttgatgatcactattacacttcagcccctctgtctcttaaaaaaaattttaaataaggtcatcttgctgctaacatgagcatctttttattactagggggttgaatgctgtaatctggtcaactgtcaggagcaagtttaattccttggactcccttggaaaatgagatctggcattaaactttcttagaagaacgggtgttcagcttccaacatgccccacagccaaagctcaggctctccccgagccatgattctcagtgtgaccagaagatgctggcatcagaaccacctgcagagatggcctcttggcaaattccagttcacaggcccatcccagacctacagaatcagagtctctgggagcagagactgggcatccctgtggaattccactaagacccctgacctagagagagctgtgccagttcctcatctttcaaaactgagctggattattcacaatagccaagatttggaatcaacctaagtgtttatcaacagatgaatggaaaaagaaatgtggcacatatatacaatgaaatactattcagccttaaacaaaagatagaaatccagcactttgggaggccgaggcgggcagattacctgaggtcaggagttcaagaccagcctggccaacatggcgaaaccacatctttactaaaaatacaaaaattagccaggagtggtggtgggcacctgtaatcccagctacttgggaggctgaggcaggagaatctcttgaacctgggaggcagaggctgcagtgagccgagatcaagccactgtactccagcctgggtgacagagagagagtccatctcaaaaaaaaaaaaaaaaaaagatagaaatgttgtcatttgcaacaacacatgtgaacttgaaagacgctatgttaagtgaaataaaccaggtacagaaagacaaatatggcatgatgtcacttataggtggaatctaaacaagtagaactcatagaagcagagagtagaatggtggttaccagaggctgggaagatggaaaattagaaagatgttggtcaaaggatataaaatctcagataggaagaatcagttcaagagatctattgggcatcatggtggtgactatagttaataataatatattgaatacttgaaaatcactaagagagtagattttaagtgttctcaccacaaaaaaaaagtactaaatgcataaggtaatgcatatgctaattagcttgatgtagtcattccacaatgtatgcgtatatcagaacatcatgttgtgcaccatacagatatacaatttgtatttatcaatttttttttaaactggtctggtcagcagttgaaattctttcttaggaggcaccagaaacgcctgctgaatgaaccaatgatgaatgaatgaataaatgaaggaaggaagaaaggaataaattgcttaattaactgaccaatgaattcatgaatgaacagatgagcaaacgtgtcaataaatgaaaagacgagtgagtgggtgggttaataagtgagtgcctatgtgcagaaaaggagtgttggtatctggctttttatagataccatcaaatttacaaacaaacatcagccaatttggtgggttaaaataatgtcaccttggtcccggcatggtggctcacgcctgtaatcccagcactttggaaggccgaggcaggaggatcacatgagtccaagagttcgagactgacctgggcaacatagagagaccccctctctaccaaaaaaaaaaaaatttaaacttagccaggtggggaattgggggacacagcagagaaggaagcctgccagcctgctttgctgtccttctgccacccaggttgcacacagccttaggaggaagagacacaatcaacttcccacacccacctcccaggacagcgcatcccaggacaggagcaccgaactgcccccatgatgacctccccagacagaaaataacagattttatgctttctacacattttttcaaagaatttttatatgtgccctctacctacaaacaaaataattatttgtgggaagaggaagcctttcagcatctgaaagaaaaccacacaagctgctgggtaaatgaacacttgccttctgagtaagcagaatgtgttttggaaatctccagcagtgaccagggatgtgcacagcttgagaagtggaagctcttttttccctcttcgcctctctctccttcctccccttcccaccttttctttcttatcctctcttctgctctcaaatccttttcctaagaaggggtagggtcccaaggagcagtggagaaaaagaaagcagctcaccacacccctgcactctgcaccggctggtgtctctgcctcggtcctaccagtcacataatttgcaggaacaatccctgcactgccttgcaccactgcccctctctaccagtccttgcccataggtcagaggaacaagagtggtccacaggtgctgcacaaagacctccgttctgaggtctgtactatctggctcaagctgtgctcaaactttgtccccagcttcttgggagatccacaggcaactggggttagacaagacctctaattcagaactcaagcctcagctgctggagacaatgtactttcacaagtcaggggatgggccaccagccaggggcacagatgggacacattgctatactggagtgatgcttcatctttgcaacaggacacacccaaccctaggctaggggagaattttctccagaggaaacccaggaattactaattatcattacttgtttttatactttttttttttttttctgagacagagtctcgctctgtcacccaggctggagtgcaatggcgagatctccactcactgcaagctccgcctcccgggttcacgccattcacctgcctcagcctcccaagtagctgggactacaggcacctgccaccacgcccggctaattttttgtatttttagtagagatggggtttcttcgtgttagccaggatggtctcgatctcctgacctcatgatccgcccacctcagcctcccaaagtcctgggattagaggcgtgagtcactgcgcccggcctctacaatattattgtaaatagatgacccaaaatgtgggcaggtttttccaaggggtttctgctctgacagccttctagaatacccctcccagcctggccacacacctggggcctctgaaccctggcaaggcagggaatgttcaggactgggaactctgttgattttatttctattttaatagtctgagcattgccacctttgtatattacattttctaattttgtaattctatggctaagaaactgtggttacacctgtggctgtccccatggcagaaggcaagccagggcggcaaagatacagactttcccccttcaggccccagcctgcagctcgcatctcagctaaattgccactggttcccggcctctctctgtcttccagccagtcctgtttcttcaccttcacggaacacgatcgggccgggtttctcttctctccaatgttacttcaacttctcgtcataaaatggaatgattccagtgtttatgctgttagctacatttatctttaagagcaagatgttgagtttagctttaatgatgaaaaaagcctttcaaaggataactcattgaaactcattatgcactataaggccactatttaaagattcggtaattccagtgatgatctttttaaagcagatttatagcagaaaatagttacattctttgacttcagttataattttctattttgtaatttaatactcctttagtttatatttgcacattaaaaatatagcatctaaaagtccatcattaaatacttttaataagtgcaataaataagttttacagtgtgcataaatctaaaaacaaaacccaacataaattgttaatcttacactttttctcattaattgcaatacataaacatatgttttatacaaagatatttgctacgaaataagtataataaatacagtttaccacatgtattaatcttaatagttacaaactgttaatcttatatattaggtaataatttgcaataaataattgtttattatcttgatgtttgcttgtcttgggttctagcaatatgcaataaagaaatgcaattttgaataatttgattgtaagactgctgggaaaatactgtatgttataattagctgggagaggattctagtcacaaaagcaagcatggagacagggttcaataacccaaacatacgttattgagtccataaataattttaaaagttaagttcagtttcaaacaaaacagaattttttaaccttaaatgcaattaaagaaacatttcacattctttagtgctttcattattatacattcaaaaggagatgaagaaagctggaagccccatcaaaactgccagcctccaagctgagacgggaacatggctgcctttgggagaaagagtggcctgacagctcatgcccatcagccaagggctccccttggcctggaatacaccctccggaacagccagcaggtgcacccacaaacgcagcaccctccatacctcaccttcaagctggcacttgctgaactgcacacacatttttctaagagaggttgtcacctatactgagcttaatagaaattgttaatcttatatgtaaaggtaataatttgtcataaataattgttcattatctgggcctttgcttgtcttggagttgagctgtatgcaataaagcagtgcaattttgagtaattcgattgtaaggctgctggggaaacatggtggattgtaatgagcctaggaagggtcccgtgggccagagaccccaaagaaccaacctaccagctctggcacatgcaaagcccaggtcctcaccagcaattgcacaggttctttaaatagtctctccaagacagagagtgaaccagtttccccttctcatgtttctgccagagtaaacatcacttagaggaaaccagtcctagacgaagtgaacctcggtccctgggaaaggctgaggtggccccagggcaatttagtcccaccaagccggctgattggcaccaaaggctcacctgtctgcctggaacaggtagggccagggggtcacttcctccaaagtgaccctgacactgctcccggcagcagcagcatcctggcacatccctgcaggcagagagctagagcagtcctggctaagaggtggctgtgaggccagggagcaaggaccctgtgcactttggcttcctagaatcccacgggcacaaagacccacttcaaggaaacctcccccaagctgggaaaggaagggagggagggtgggaaggaagaagggagggaaggaaaaagagaaggaaataaagaagaagggaaggaggaggagaaagacagaggaagaatgaattttaaaaaaagagaaagaaagagaaaagaggaggagaaagggagggaaagagagaggaagaatgaatgaaaaaaagagaaagaaagtgagaaagagagaaaagagggggaggaagggagagaagagagaaagaaagcaaggaaggagggagggaggaaggatggaggaaaacagaaagaagagcaagggaggagagagggaaggaagaagggaagaaaaaagagagaaaaaggaaagaaggaaggaggaagggattaaaggagggtagaaggaaggatagagggaaggagggagggaagcgggaaggaaggagaaaaaaagggagaggaagaaagagaggatggaaggaaggaaggaaaaagaaagaaagaagggagaatcctagatccattataaccatgaacagctcttcctaatataaagatgatcagcaccccacaaaaacacacacatacatgccctgacgtgcatccaatgacatgagtctccatatcaaagcccacttgcagtgtgttcctggcagtcgctgcggtttgtggttttaatatctcgcttcttctacgctcctggcacctgctagagtgggcctggcttcccctctttaggcacagctcacaccgggagggtaagcccccagcctgctctctgcctaggctgggcacggcacagtccacagcctgggagggagccgttcatcagggtgacataacggttcagttccagaagaaagttcctgcctagggctgagcttcaggcagggtaggttcccaggagcaagtgctgtgagcctgaggccccaggcgtctgaagacaccacaggtctccccctcgtctcctccatcccagcaagcacctgcggtccaatcgcgctaagccaggggccctgctttcagccgggttggaaagggatagaagctcccccatctcctgcccttttctaaagacaggcagctccagcaaaaccctcagccctcaggcgtccctttcgtggggtccccgcccctgttctggaaatgagaccccaggtcccaggatgcagctggcatcgcaggggaagggacttgcccccaccctccacccgctaccatgacccgggagaggccttcccgagggtctgaaggtccgcagagccctgccccaccctagtccaacaaggggaccgcgttttagggacatccctggattgtcaagaaacgctggctcatccggacccccggggagcgcagcatgaacccaggagcaccctgacaccccgaaaacagggaacctggggcccttctcaaactcaaggggaaggaaagggagcctgccaagttctgcttctgcgaggcagctgccaccaaaacccgctccgagggccccgccgggccgccctggcagctggaaaagcgcattcctgctcgcccgaggatgcagaaggcaaccgagtccccgggcggcggcggggcaactgcggaaatcacgcagccagatgaagctcataaatttcccctatgaacaattgttttcatttccctcccatgccactagatattataagtggaaagcaaaacacaagtaaatatgttcattccgctcttgcgatcggtgataaaccggaggcggccgaggccgacagaggtcagcaggccgctcgccacgggtctgcgagcggacactgccaccctccggccgcgcgcgggactgcaccggccccaccgcccggctctcccgcccgctcgctgcccgccaatgttcgctttgcgcccttcgctcaatgtgcgtgcaaattacagggacattcgaaaggacagagagctcccatatttaaaataatcatttttgttcatcataacctctcttccagagataaccgctcttattaacgttttcgtacaattatctccagtctttatgtgcattctacgatgtcttctgtgtacctatgaaatacaaagcttttcctacaatattaaaccttgatttcctaggtatcacttaaacgaaagttattgtcacacaagatagcctcacagatatctttttaggggctgtgtaatatttcaacttgggactgcaccaaaagttactgaaccatctcccaattgctcatttaaagagtttctaatgttttcatccttgtgcataatgctataactgaaacctctattcagaaacttttgtttatattgttaagatccatcaataaaggcagaattattaaatgaaaagaaattaactttttttttaatggattctggctccatgccccaggctggagtgcagtggagcaatctcggctcactgcaacattcgcctccctggctcaagcaattcccctgcctcagccccctcagtagctgggactacaggcacgcaccaccacacccgactaatttttgtattgttagtagagacggggtttcactgtgttagccaggttggtctcgaactcctgacctcaggtgatctgcccatctcagtctcccaaagtgctcggattacaggtgtgagccactgcgcccagctgagaattaacatttttaaagctcttagtagcattactattttctagatgtataatacctatgtggagaatattatttaaaatgatgagtgaatataaaatagtgctcaaatgagtggtcagaaaaactgtatcaccaacatatcagtccccactcatctcatctttcacttgaatgcaaggccaataaaaattccatcaaagcttttttgatattttgtcacattgattccaaattccatgtgaaagagtaaataaggaaaaatctccaaaaaacatgtttgtgaaaaaagagaggagacttcctcaacaaagatattaacatatatcacagaaagctacaataatttaaacagtgaagcacaaaatagagagcacaaaagggagcaaataggcaataacttacattttaacataaagccattttatatcagtgggaaaaggatggctgattgatgaagttataggtacaatctgccactcattcagaaaacaagaaaagttagtgtcctacctcataccacatattcaaatgaatgctataaggattaaagatttaaatttttaagtgaaactataaaagtgatatttacatatatggtaatagagaagttctaagtccaattgcaaaggcagaagctaaaaactttaaaatgcccagatttgaggtgcacaaatttaaaatacccacatgtgaaaaatataattttgaaattgaaaggtaaaccaacactaggagaaaaaaacactttcaatatacataacagaaagaaggttaatgccccaggtgtgtagagctttctcacaaatgaagaacagacaaatacttcaatagaattggggacatgaatagcaattcaccaaaagaaatacaaatgatagacatataaaagatgtttagtcttattaataatcaaaagacatgcaaattaaaacaaaaatgagaaaattttgtccctatattgataaacacaaaaacaatgattgtattgtcaaggatggataaacgaatcctttcaacaccacaggtgatagggtaaatcaggtaactggtaaactttataaagggtaatttcacaatatgatcaaaattcttacaacacgtgacccaaagattctacttccaaaggaatctatcatgggtatgtacaaagattcacctgtaagattgttcattgctatcagaaacaaaccaaatgtccaacaataggcaaccagattttacatagattatataatatcataagataatacaatcaagtcctcaatagtaatgttgtagaaattaacatttaaggatgtcttaacatttaatattcaagaaggtctcataaaatactgctttatagcaaaaagcaagttacattgtaaccatgctttctacacacataggaaaaaaaaacctataaggtattcctttaaataataataatggcaggtggactacaagtaatttttaatattcttttggctgctttaatattcttttttctttatatatttaacaattttttatcaattgtttagaagaaaaatagttttagtggttttctagaaatattgtattttacgttcccaccagcattacttgagagtgtttgttcaggccaggcaaagggggctcatgcctgtaatcccagcactgtgggaggccaaagcgggaggatcacatgaggccaggagttcgagaccagcctccattctaccaaaaaaaaagtaaagaaaaaaaaagacaatgctcattcatttgctcattttttaaatccaatactctcaaaacacacattcagagcaaagcacgttcaagcctggcaacagctgtaaacaagacaaagccctgcccttgtagagcagtcgataagctccacggttaggaaaactgaaaaggaacaaaccaagaaagcagccccgtggggatgttccatggcctgctgtggagggaagcagggcgagggtcaccgaccggctggggaaggagctatgctagggaggggttccgggagggccactcagaggaggtgacggtgaggagacctgagtgtggtgagcagcgagtcacctgtgaatctgggacaagcatttccccgcagagggaacagccgaggcgaaggcccgaggaggggaggggcttggtgtgcctgcggaacagttgcgcggagccccgtgtggctgaaaaggagaaggcgaaggagaggcgtaggggaggggacaggtggcaagagcccagagaaccttctggggcacaggagggagtgtggattttcttttgtgtatgatgggagccgttggagactttgtgcgtgagagcgacgagacctgatttcattttcccaggatatcgccagctcccggttgagaatggaacccagtgtgccagaactgcagcagggaggccgattcaggaggtcactgcacgagctgtgcctggcctggagtggcctggtgcggggaacctggcggcactggcggttcacacttgctaactgagtaagcaaccgtcgtgggggtggaatcttgatgtgtttcttttctgagccccttgtcagctggaatgctctggtagctcatccctcaggagatctggatgtccctgaaaatagagaatcaggctaaggggattgccctcaggatacaccaccccccattctccccagcccagaaatcatcttgtgcattggccttgagtccaaccaaaacgctggacagtcagtggctaaacaaagaaagaagagcgttctgttgaatcatgatcgtcatctacactttcaggagctttcatgtccaccttcacaggtgtcagcatagaaatcacacttctcccaaaaatgcacatgcaaagttttcctgcatccaatgcaccatgtcatggaaggaagcacaaaatctatgtggtcttacacatttttttcagggtttggagattaactaatagatttccaggatttatttcctcctgggttctaatgtcatcccactatatttatatgggaggaaaatgatgtctttcctcctcaatcattttaaagtcattatcatctcttgcatgataaaaattaatcaaactattttcttaagataattcttataaaattgaggtgcctattacaggcctgcacatcttatgtcccagaaattacactcatctttgcctctcctgtttccatagtcccatttcttccagtattaactatttttttctttaatgagacagggtctttgtctgttgcccaggctggagtgcagtgatgtgattgatcacagctcactacagcctcgaccttctgggctcaagccatcctcctgccttagcctcccaagtacctgggatcacaggtgcatgccaccacacctagctacattttttttatttttattttttgtagagaagggggtctcattacgttgcctaggctggtctcaaacactcaagtgatccttccatcttggcctcccaaagtgccgggattacaggcgtgagccacgctacccagcccataatcccattttaccatgcacttggtccccagtttctcaagagatctgtgtctgcccttgcccagtccctcccttggggaagttgcttctttgtagccagaaaaagcccttggggtggtggaggatggaggaactgtgggctgggccctgaggacacagtccgaggcaggtcctgtgccatctgggggctgagacactggggtcaaatatgtcagaggtaaattcgcaacttccattatccttgcccaaacctggagggggctgctctgtgtgcaccagggggaccataggctcaggatggggctcttctgtgcaaggcaatttggggattcagccggtgtcctaatgcctggggtgccacctggatgaatgaatacaaaggcaccagaggaggaggtacttgtgtggatagaggtatctgggactccaggtgggggtcactgaactgaaaacccatctgtcccaagtaaggcatgtgataagagaagggcatctccaaaagaataccttgggcacggtgctactgcaaaagctaactcaagactccccccgcccctagtattggcatggaaaagtctccatgccagcaagtgatacccagcacggaccaaggacatcttagtaccagcagtctctgacacacatgccagaccaccaaggtatcacaactggccacagcccatcccagagacagccgcaccacagcaaggcagccacagcataaagtcggaaggtccttccaccccgactgctgcaacaaaggcacttgcttacaggaagcagtgagaacatacatggttacacatacggacacgcacatcggtgagcatctctcctctggacttgaatgcctctgctctgcgctggcactcagcgtgatacctggcacttggtaggcacttaatgagtgttttctaaatataggaaggaacagggggaatggaaggactgtgtagacatcgtccagtggcttgtttctctaccagtttcatatccagaaagcagcatggcatttcagggtggcgctcaggccatgctgtcagtttcataccgagcatcagctgtgggggaaaagaaggacacgcatgcccagggggctgggtggttttacctccgttaaaaaaaatcaccttccaagagacactccccaagttctgccgaggaaggacacagcacaggggatccacctgccttcaaggcgaccaaaggagcagatgccagcaggcttgaagcagagcccttggcaggcaggtaaagttggacaaaccctggtctctgttgccccatctgtaagatggcactaattacctaagcttgtccccagactctaatgacataatgagcatgaaagcccctcattaggggggcgaaaggcatcgttatcccatgtttaaaggacgtcatttgccactgggcagagcagaggaagaggaacaggaaggagccagaagcctgatgctcttggcccatcgcctatcagcatcacatctgagcctgggatctccagccctgggctcctgcctctcctcacgggacccagagctgcctggagggcaagaccccagtgagtgctcagagcaaaggagccactgaagacactcagactggcagccctatgtgtaagggtgtgactgccttttacccggtgcaaggagcaaggacatggtgggtggaaagtgggcagtgaggcctctccatttcaaaaggcttcccccagtggccggaacggaaccccatggagggcctctccatgctcttcatcagagagcagacatctccaccaccaccagacatagaaatcgtctccaacaaaagctgctcaattccctccatctcggaacagagtggcaaaggcatgagagttgctacacattcggaggtagacaagcacatctaataaacacagagacaatctgcccatttttggacccctgcattagattcccaagcagatgctccaccacactcaggctgcaagattagtgtgggagggactggaggaagggctcagacacccagacccgctctctccccaccaggctgcgcgtctaggaattgtctgtgtcacgttgctgctgtcaccaagggagggcccacggggatgagatcctgccccaaaagcaagccctgcctatgttaaagacagagcctgcatgagtcaaatccgactcctgcatcccatggtctgtttgggaggctgccctgtccccaccaagggtgccttctcagtcaccttcaccgcactcaggcttaccctagcacactttaaaccaggaacgctctcccttgagctatctttttttttttttttttttgagatagagtctcgctctgtcacccagactggagtgcagtggcacgatctcggctcacttcaagctccgcctcctgggttcacaccattctcctgcctcagcctcctgagtagctgggactacaggctcccgtcaccacgcccggctaattttttgtatttttagtagagacggggtttcaccgtgttagccaggatggtctcaatctcctgacctcatgatccgcctgcctcagcctcccaaagtgctcggctcttgagctatcttttaagggacctgaggatgaaacagtgaaactggagactggcaggtgttcactgtcagtctggggaaagcagatccaagcagccatgagaaaaccccggaagcagtcagagaggaatcaaagtcctaccggtgtcatgtggccccaacagagccccggagagagccaactgagcagaggcctgtgtggctgggcaggcaggggacatgtcctggagggagcaagccttgaacttgtggtctgtagaacttgcccttctgacccaagggtggccgtagaggaatgttaaatcagcacccccagccctggaccacgcctgatggcctggaggagtctgcttaacctctccaagctgccccttggagaatataagatcacgaacctggacctcgtcccacccaggagacgccatgaggaacacagtccccacagttcacaggaagttgcagaccggaggtgaaagagcattttgctggaaggtaatgaggtatgttaaccaccctgaaagttaggggattcacccagcctccagttctagacagctctcacctcacattgagcaccaaaaaactcaacaatcaaggtaagtgcaatctctttaaaaatcacaatgaatgcatttttcaaaatccataatgagcaagattatcaaaattttaaatcaagacaagctgtgaccttgctacctcactcagcacgacctggccatttcacactctcataggacagagtactccatcctcatttcactcaccaccattgtcattaaatattcatcggagggatggttggattcgtttttgcccctgcaagggcgagggtggcatgcttcactagtctgtgtacctggcacctagctcagagcttggcacatggaaaagtggtgcccaggaaatacccaaatgaacatcgtagatggaagttaatcctgaatgctgtgctgagagctcttctctgctcagatgccacggcgggcttctgctcctagccctgggggactctccacccgaccctatcgctgccactgtacaagctcctaccttcccaaatgtagaagccagatctgggtgtgtgtgtgtttgtttgtttgtttgtttgtttgtttgtttgtttttgagacagggtttcattcctgtcgtccaggctggaatacagtggcacaatctcggctcactacaacctctgcctcctgggttcaagccattctcctgcctcagcctctcctgctcaagccagctgggattatacgtgcccaccaccatgtcctggctaaattttgtatttttagtagtagagatggggtttcgccatgttggctaggctggtctcaaactcctggccttaagtgatccatctgccttggcctcccaaagggctagaattacaggcgtgagccactgcacctggcccagacctgggttctaatgacccctttgctttcatttgtgaaaagatactttcagtgcagagctgatgggatgcagtgcagacacaaacaatccggcaggtcccaggacaatgtgtgactgattttctgcacctcctggacttgtctccacctcacacaagggccaccgccaaatggctgtgggagggtgtgtcctgccgttttgggcacttgggcggctgggcttccgcccccaggagccatgttggatccattccaagacagtcactctctgtccacttcttcacagagaacatctctatattgaggaagtttaatttgaggccagcaggaatcatagtgtatgggtttgcctgaaacaggctcacatgcaggcaatggctaaataaaaatctccaaatagccatgccctatttttgcatttttatgagttctttgaaaggaaaaaagaaggggtgaggaagaaattaagaaatacaaggctgagcacagtggctaacgcctgtcatctcagagcattgggaggatggtggggaggatggcttgaggccaggagttcaagatcagcctgggtaacatagtgagaccccatctttagaaaataaaaagaaaaataaaatctttacagaaagaactacaagatgtttccctgtccttacctgatctcccagttgcagggcacctaggaagggaggggaaagtgcagggggcctcctgcatgggcagccaggtcatgggtcctgccaacagcctctgcccagctcctcttctataagtggaccttggccctgtcctccgtatgcacctgttctgtctcctctgacttggagagacagctttgcctttctgcctcagaagatggaaaaaggagggaagtaccccaagatgtcaccattcactcccccagctcctgggaagatgcccagctaagaggtgcccaatgccagcaggcccagcactgccagctcccagggacccaggccaagccagagactggcctgggctcattgtagaggagaaatggatgaggagagagaagcaacatgcggttttaattctttgttaaaaacttggctgggcactgtggctcacgcctgtgagcactttgggaggccaaggcgggcagatcacttgaggtctggagtttgagaccagcctggccaacatggcaaaaccctgtctctactaaaagtacaaaaattagccaggtgtggtggcggacgtctgtagtcccagctactcaggaagctgaggaagaagaatcgcttgaacccaggaggcggaggttgcagtgagccaagatcacgccactgcaccccagcctgggtgacagagtgagactgtatctcaaaaaaaaaaaaaaaaaaaaaaatcataaaccctaccaaagggtcaatctctctttcagaaaggacattaggtgctgttttcctgctggaagccccataagtctccacgtctcctcaatatacaattcaaaaaagcctccaaattgccgctgctgtcatgctaagcattggaaagttctgcttgaccttttattaacatttttctaaaccaatatgtttggtgtggtggttttgtcttttttttttctttttttttctttttttttttttttttttttgctacaagcaccctgaggacttatgaaaaatacttttttctgtagtttatcccatatgcagttaataggctcacaaatataataccattataaaaaagaaaaactgccaactctgctaaaaaaattgtcataacactaaattattatataaatataaaaggagtgtgtctgtaaaatattcactcaatgaacatcccaaggtgatggttttgctatgttgtttttattcctgagagatccataacacactcgaatatgccacatgtcaccacatgaatcaggcagttaatacatgtgctttttagaagcacggatgtcttcctgatagaatgtgctataaaaaaatgtggagatccggctgctttgtctgataggcataatttaatgtctggcttataatactgcatcttaaggaaaaatacccactgtcctatgtagttatttacaatatattgctaagtctatgcaaatatgtttccccgagcctgggattatataacaaaggtcaacaatgtttgaaatattttgaagcatattcccaatatgcgtagtgtatggtgctaatatccaatatatgcacatatatcttaatatatttccagatctttctgttcattgttctctccgtagcttcccacagaatactattagagaaatgttttcttctgagtaaagccaaacgttgcctatccatcttggaaaaatttattaaggtggctaattatgcggtccttaatattgcattagtaggaaggttgctcaatgccactgcggaagagaaaaagatagaagccagttcaataatactgaaaccagagacgcaatacgtgcaaaaatcagcacacacctatgtcatcctatttttctgccccagatttccaaatcaggcaattccacttagggatcacatgtgtgcctatgcacccacacgcacacacacacgcacacacatgcttgtgatctggtgtgcacaaaaccaacattacaagccacacattctgcttctcccttccaaatattgcagattttgcccttatttttctgaattttgtgatcacctgtgcctttcattcaaatcgcttccttcaagagaaaaagaaatggtttggctaattgcacaagagtaggggagagggttgtggaaaccagacctgcgctatccaagccacatccagaaaatagcataaaagagagatttgtttacatcaaaggtatatgaaatctgagccctcaattctgtcccccatttcaaattatattgttcctctatcattctccagtcactgggttgaaccaaattgggaagactacagtaaaacagacaccaaaacaagagactgaggtcattagaaagaggccgatccccagaaaagatactcttccctggtatgtggaccaggctggactttgcatgtggcttttcatatctgtgctgctgtgacactgtgtagctgtcccaaactctggtccacaacatcacccagaggttgactctggcagcttcagactgccttggtattttgggtcctcgaaaaccccaaggctaaaaatccttccagccaatccatgttttaagacgctacaaaaatcacccattttcaaggactaatggagtatgtctagatgtggctatggaactgatgtatttttttagaatctttttccgtgttatcagtccaaccagccacacagcccacctgatgaggatttttaaaaagagccaaagctgtgaaacctctctcgccagcagaaatgagttatctagaagcttcttgaacagaattctctcaggaggcgagattaagtctgtaatcccagcactttgggaggccaaggcaggaggattgcttgaggccaggagttcaagaccagcctgggcaacccatctctacaaaaaaaaaaaaaattaattaaaaaaatgagttatctcaggaaggcaatcagacacacaatgcaagcctcctcatgagaaagtcagctctgcagtttccccagaagagaatgtcattaccagaaattcacacccataatccccgcactttggaaggccaaggatggtgaatcacttgagcccaggagttcaagaccagcctgggcgacatagtgactgagacaccatctctttaaaaaaaaaaaaaaaattaatgaccttcttgcttgactctggccatggggtttcctgaacccccatgatgatcccacaaagtgtgggggaagtgggaaaatagaacaacacacatgtatgctcaagacagctcctatttcctcctaagccataaactgcttcatagaaccttccagaaggttttgaggaagggttttcacaagggccgagagagctgcgagcatctttgttctcccactggaaactcaactgtatataagacacagcaaatgttaaatcatttaaagagagctatttttcatagtttccagtacataaatgtgtttcagtacatgttattgtaaaatagtgttcctacttacgttcttatacatctgttgttgtgtttactcatcctttcgttctgacttttagaaatagcaataaatctattttttaatcccctctgctgatgactgattattcattgctaaaaggggtggaaggaggtccatgtgaagagtgatccgccctccagcacaagctccactttcacaagataaacagggtccagggagattcctctttcgtcctgggtagtttatgcaaactaaataaggacttggtggcagctcaaacaaatataaattaccctccagtggaaactccaaccacttgttacagtcaatttcagtaaggaggagccaagggtgacatctacacaaacaatacaattcatttctatactgcatccctaatacaaagattgcaaagggcttcgcgggagtcagtcatcactgatctaaaccaaacagggtgggaagccaagaaggcagaaggaggagaagaggaactgctgcttctggaccctgggaagaatcccagctgtaattggaatcccaccaaagcaagtgcctacagctgtgtaaatcaggataaggcaggctcgcactgctgcaacaaacagtcccaaaatctcagtagtttgatacaagtgttaatttatttctttatttttttttaagtttttagagacagggttctgtcgcccaggctggagggtagtggcttaatcatggctcactgcagcctcaacctcctgggctcaagcagtcctcctgcctcagcctcccaagtagctggaattaacaagcacatactgccacacccagctaatttttttttcttttttttgtagagatggggtctccctctgtttcccaggctgatctcacactcctgagttcaagcaatcctcctgccttgaccactcaaagtgctgagattacaggagtgagccactgtgcccagccacagtgttaatttcttgtgctgagggtctggaagactcacaagggcagctgcctcacactccatgtgtctcaatgatcaggctgtattgttctgcagctcctgtatctcaacacaaggcgtctgtggttgcccaggcagaggaagtgaaagaaagccatagttagtcacacacaggctcttctatgctttcacctggaagcactcttttgaccagaataaggcacatcttcctatttgcaagggagctgggaaatgtgggagaagagaaggtcatgtctggtgaacatcactaattctaccccaggtgacagacaatttcacagagccactcatcgcatggggattgcagaatacatcacaaaggaccctctaagcactttccctaaaccgtattgtgcagtatgtttgcccctctgtctacaactaaacggtgctttaactgcattccttgggctaagtgatggagcaaacttaatttcctcatctgtaaaatagggataccagtgccagtctaacaggccaccacgaagacctaagactttatgcatctgtaaactgcacatcattaatgcacacatgtgtgttagtggaagtaacaaccatagctactgggctagtatttcagcatgtggggcagggaaaccctggttcaatgcctagaacttagcatccagaatagtcaccgaatggtgacccccatccagttccatttgatgtctaactggctgctttggtgattgcttctgtttttagggcctttcaaatttactctgctttaacatatctgctgatgatatgaatgtctgtacttatgtctaccagttcttaccttagagtactggctgggattttttttttcttttctaagatggagtctcactttgttgcccaggctagaatgcagtggtgctatcttggctcactgcagcctctgcctccacggttcgagcaattttcctgactcagtctcctgagtagctgggattacaggtatgcaccaccatacctatctagtttatgtatttttagtagagatgatggccaggctggtctcaaactcctgacctcaagtgatctgcctgccttggcctcccaaagtggctcacaagtgtgagccactgtgcccggcctactggccgagattttttgatgaactttttaatggcatctctcccagataccttacaatgggattcccttgcaggtgcttccatttgcacttagcccgtggtcaagcttgtttattttgccacactcaaaagtgaattccaatgaatattggaaaaggccacaggatctggttatttttccaatcatataatgctgattttcttgttttgttttgttttgtttttgtttttgttttgttttttgttaaccacatgtattgcaaactcttcttcctaaaaccttcttggcatgtggtcatctctgggtcacatcagaaaggaccaattgcaaacaaaaccaccttgaggctggacaaaaggaaaagaatgagatggactctttcttgctgggttcttttggagatggcgaggcatagcagggtgaaagaaacttggctttgaacttgagtttcaatctcaattctgccatttgtatacgtgcccttaaacagctggtacctgatatagtttagatatttgtctacattggaatctcattttgaaatgtaattcccaatgttggaggtggggccaggtgggaggtgtttcggtcatgggggtggatccctcatgacttggtactgtcctggcaataatgagtgaggtcttgcaagatctaattgtttaagagtgtgtggctcctgccccttctctcctgctcctgcttccaccatgagaggtgcctgccccctcttcgccttctgccatgtttggaagcttcctgaggcctcaccagaaacagatgcaggtgctatgcttcctgtacaacctgcagaacttgagccaattaaacctcttttctttataaattacctagtctcaggtatttctttatagcaatgcaagaacagcctaatacagtgtccggtcttggggcctttcctggaaggagaggagggcggtacagggaggactccataagacaacaggccaaggactatggcttggtgggtactgagcatttggtgaagcctagttctcttactcaagcttcaggtgacacaatcatcacggggcacctgaagtatcataggactgcgccagtggaggagttgtggacaagttggtacaggatgtgcatgcacataaatagtctcctcttcataactttctgttgaaagaaatggagccatctccagcaaggaaccatgagactttctcatggcttgagctgtgacctccagaaacgtcctccaacagagccgtccaacagtggattttcctgcccaacagcccaacacacgagtgcaagtttgatcttcgccacctcctccaatgctatggtaggtgaccccggcagcaggattggaatgattattgaagtcattgcttcattctcagactacaccaaccaatgcccagttcagcttttccccaccagtctcttggctgtttcaaccaaattacaaaaacgtgaagataaaataattagaaatgctcatttgtcactgagaatctggcaagcaaaacctatattttgcaagaagttttaatattgtacttttttgtgctttcctaaactaatttagtctactaattttctataattacctgcatgctcttagcttccgctggtcagatgagttctgagacacttatataaccggcattaaaaagatgcatttagcggctcagatggttaaagtaccaaagcctatagaatccggaggttattgtattctcccacaagtacttaaataatagcctaaaatctgaagaattactttaatactccaataaaaataacccaattcaaaacattttcaaggaaacagagttctttgctctaggctaccgagtaatggctgagaaaaagtatatagcctgtcacttctgattagagaactgtgcctctgtgctttgaatgaggggcatgtctggtaataggaagtgcagatattaaagttaataaaataatgtggaatacgatatatatgaaacttgaccaactagagcacagaatataacatacattaccctgttcagtcaactcctgtggcccggcatctaatgacaagtttaatttctgtttccaatgagagtacagctaaaaatacaatttccagattagacaaatattttatccgactccctaacaaatgtaaccaagaatggctgacgtgtctacacagatgcccagtgaccatgagagggaattactaggattgcaaactgctcagcctcaaaagtccgtgaaaccccatcatctttgaggtcattataaataattagttgcagacgcagagatgttgaggcttcgtcactaggaaagcacaagggtggatccatttctctcctgccctgagaggctccaagctccctctcggcacaattaggcctccccaaaccatccgacatcaaggcccctgaacacccattattgcatctttaatctaaaaccccaacgccaaccataatggtttttgtttttcgatacattaaccttcaacttgtattttcactattaaataaccagcctgagaacctcttagaatttttttttcccagtcacctacaagaaaccatgcagttcccatgacatgaccctcttaagggatttaaaagcaattcaatgagctaatctcagtaaacctagaattaaagttcttgtttccatatttcactttcaaaatatttagaactttgacagatatgacattatgttttcattaaaacagctgatttcaaaatgttgctctgtgcagaaacgccataaacagtttatgatgaactgccacgctcttaattaaaacaataaatccagcacacaatatttgtgcagcctccggtctgacctttgcctcttgctatccaccaccaagccgcggctgcgttcccaacgccagacgtggaaggttttaaaacatgatctgaaaggcactaaagataaaataagagaaaacgtaccattagtcttcgcagttatgattaattcagttcatattttacaatctggttatggagtaaaactgcagactttacatcaagtatttgccattcactatacctaatgtataaaaatgcttgatattttagaaaatggcaccgagctaattcaccacaaccccatgaaggacaggaattgaaataataaaaacagagagtgattcgctatccatccaaagtgaagataggttcgcactggttggacggtcagcctcggacgataaatatgtcgattgcagcccggcttcaccatgccacgtttatctctgtgccgcgagatttcagattaaaatattccctaaatctctcacatctgcttccagagcaggcaacaagggtgttaattaccaagcagtaatgacagttgatttgtttccctggcctggaggcaccaagctaacttccagccttgccatcctcaaggacagaaatgattctgaactggggctcactcatttgtaccccatagagagagagcactgggctggtttggggaccattttgtagcctctctgtggagggatgcgtggacagccagcatctgggctccaggagaaaatgctcccagctgtctttggagcacagacttcctgcaggaaggggagggagtgtccaggcacctttgagggcatggagacctacctcatgatgcctgcagcaggctgacccccaagacacctccccatcacacctaacatgagcatgtgtccccatgcccgtcctccgggctttgtcttaccaccttctctgtctttccaaccctctgtccccacctgctccacatccatatgacaaacacatgcacacaatacatggactaatgcagagctggggaagcaaagcctctgaggctgggagaccaagggtgacagtgagtgggacccagctctgcaggtccttgtctgagttgcaggcagagtgcaccagggttccagaaagatggaggaaaggaaagcagtgctggccatgggaggccattcaggctcgcagccccggacctgggttccttctgcccacattagaaggagtagaaccccacgtgggccacctctctctgccagggcaagaccctcacgttggcctacctggctccagcctttgctcacctccaaagcctatcatgcctttcctctcccctctccaggacccttacttccctctaagggccctttccagcctacacagcacagtggacttagagctgtcatcgggacctgaaccctggagggaaccaatgctatgcacccctgcctgccatggagcctccgaagcggcttccagggaaggcgctgccagagcctttctcctacctggccctaaagacgtgccttagcccttgtttggttggggaattctgtcccagccatcctagctgtgaaagagccctgcaggaaggttaggccctgggggtccctgagcaccatccaggactcctgtgctcccctggccctgccccacgtgcaacatggctctctgccagggttctcactcagtgtgctcactgtgtgtgtgtgtgtgtgtgtgtgtgtgtgtgtgcgtgcgcgcgcgcgcgtgtgtgtgtatgttcggatgggatctcgttatgttgctcaggctggtcttgaactcctgggctcaagcgatcctcccatctcggcctcccagagtgattggattataggcgtgcaccatcatgcctggtcaagcctacagcgcccagtattcccagacagtctcccatccaagtactaatcaggccccaaccctgcttagcttccaagatcagataagaccgggcacattcagggtgatattagggttatgccttacactttgaatcaagcatcagagttgagatggggcccatccaccttcctgtcttcacaaaagaaggtaccctaatggcagttaaacccctctgccccccaccatctgcccctacacccaggtacttggaccagaaggaacagctccagatcctgggtacctgccatcccaccccctacattttccagctgtgcagcccaccctggcccacaaggtcacactacatgtatccctgggatcacagtggcccctgtgaatatcaccattttttagaaaactgatagatcagaggaataaagtcaccatcctgaaggcacccagtgaataagtggcaccacggaattgaaacccacacccagctgagcacggtggctcacactcgtaatcccagtactttgggagacagaggcaagtggatcacctgagctcaggagttcaagaccagcctggccaacatggtgaaaccccatctctacaaaaaatacaaaaattagccaggtgtggtggcgcacacccgtggtcccagctactcaagaggctgaggcggggggatcacttgagcctagggggttaaggctgcggtgagccatgttcgtgccattacactccagcccaggcatgcagtctcactgcagtctgagagtgagatcctgtctcaaaaaaaagaaacgcacatcctctgcctttagggctgataggccctgatagtaatgccctccaccaccctatgcaaccccaccctcggtcagacccttgagtttctcaaactgaggcccatagatacgtcctcaggagttcacgactcttttttttaagttataattttttttttttgagacagagtctctctgtcacccaagctggagtgcagtggcatgatcttggctcactgcaacctccacccctgggttcaagcaactcttctgcctcagcctccagagtagctgtgattacaggcatgcaccaccactcccagctaatttttgtatttgtagtagagttggggtttcaccatgttggccaggctggtctcgaactcccgacttcaggtgatccgcctgccttggcctcacaaagtgctaggattacaggcgtgagccaccgtgcctggccggtaagttttaattttgtgagtgttttcacttagcacattcatctaaaagaaacaatgaataagataaattctggatcacctgggtgaccagtcaccatgtcatctccatacagtttgtgttttccgtcagaacagacatacctcgttttattgcattcactttattgcacctcccagataattgtgttttttacaaattgaaggtttctggcaaccttgcatggagcaagtctatgggcaccattgttccaacatcaggtcctcacttcatgtctctgtgtcacatcttggcaattcttgcaatatttcaaactttttcattactattataccattatggtgacctgtgagcagtgattttttttttttttttttttgagatggagtctctctctgtcgcccaggctggagtacagtggcacgatctcggctcactgcaacctccgcctcccgggttcaagcgattctcctgcctcagcctccccagtagctgggactacaggcgtgtgccaccatgcccggctaatttttgtatttttagtagagacgcggtttcaccatattggccaagctggtctcagactcctgaccttgtgatccacccacctgggcctcccaaagtgctgggattacaggcgtgagccactgcacccagcctgagcagtgatttttgatgttactgttgtcattgtttggaggtgccaagaactacacccacataacatggggaatttaatcgataaatgtgcacgttctgaccgcttcaccaactgattattccttcatctctctccctctccccaggcctccctattccctgagacacaacaatattgaaaactggtcaatgaataaccctaaaatgtcctctaagtgttcaagtgaaaggaagagtcacgtgtctctcattttaaattaaaagctagaaatgattaagtttagtgaagaaagcaggtcgaaagctgagataggctgaaagcgaggcatctggtgctagttagtcaagttgtgaatgcaaacaaaagttcttgaaagaaattagaagtgctactccagtgaacacacgaatgataagaaagctaaacagactcattgctgataaggagaaagtttgagtggtctggatagaagatcaaaccaaccacaacattcccttaagccacggcctaatccagagcagcccctaactctcttcaattctatgaagcctcagcgaggtgagaaagctgcagaagaaaagttggaagctagcagagtttggttcatggggcttaaggaaagaagccaactccataacataaaagtgcaaggtgaagcagcacatgctgatggagaagctgcagcaagttatccagaagatctaagactattgagaaggtagacacactaaacaatagattgtgtttctttgtttgggttttttttttttttttgagatggagtttcattcttgttgcccaagctggagtgcaatggcgtgatcttggctcaccgcaacctccacctccccggttcaagcaattgtcctgcctcagcctcctgagtagctgggattacaggcatgtgcaaccatgcccagctaattttgtatttttagtacagacggggtttttccatgttggtcaggctggtctcgaactccccacctcaggtgatccacctccctcagcctcccaaagtgctgggattacaggtgtgagccaccacgcctggcctgtttatttctttctgagatggagtgtcgccctgtcaccgaggctggagtgcagtggcgtgatctcggctcactgcaacctctgcctcccgggttcaagcaattctcctgcctcagcctcctgagtagctgggacaacaggtgcctgccaccatgcccagctaatttttgtatttttagtagagacaggtttcaccatgttggccgggctggtctcaaactccagacctcaagtgatctgcccgctttggcctcccaaagtgctgagattgcaggcatgagccaccacacctggcctaaacaacagattttagatgttcagtgtagatgcaatagccttctattggaagaagatgtcatctagaacttccatagctagagaggagaagtcaatgcctggtttcaaagctttaaagagcaggctggctcttgttaggggctaatgcagcgggtgactttaaggtaaaaccaatgctaatttgccatttcaaaaatcctagggtccttaagaattatgcaaaatctactctgcctatgctctagaaatggaaaaacaaagctggatgacagcacatctgtttatagcattatttactgaacagtttaaatccattgttgagaaacactgctcagaaaaaaaatattttttttcaaaatattgctgctcattgataatgcacctattcacccaggaggtctgatgaagatgtataagaagatgaatgtagttttcatgcctgctaacacaacatccattctgcagctcatagatcaaggagtaacttcaactttcaaatcttattatggaaaaaaatacacttcataaggctatagctacgattaatagtgatttctctgacggatgtggacaaactcaattgaaaaccttctagaaaagattcaccattctagatgccattaagaacatttgtaattcatgggaagtactcaaaatatcaacatcaacaagagtttggaagaggtttattccaggcttcatgaatgactttgaggggttcaagacttcagtggaggaagtgactgctgatgtggaaatagcaagagaactagagttggaagtggagcctgaagatgggactgaattgctgcagtcttatgaccaaacttggatggatgaggagttgcttcttatggatgagaaaagatagtggtttttgagatggaatctactccttttaaagatgctgtgaacatggttgaaataatgacaaaggatttaaaatattccacaaagtagtggcaggttctgagagatttattctaattttgaaagaagttctactgtgggtaaaaggctattaaacagcattgcacgctatacagaaatcttttgtgaaagaaagattcaactgaggtggcaaagttcactgttgcctcagccactccaaccttcagcaatcaccactgtgatcagtcagcagccatcaacatcaaggcaggatcccccaccagcaaaaagagtatgacttgctgaaggctcaaaccatgattaacattttttaccaataaagtatttttaattaagatatgtacagtgttttttagatataattctattacacacttaataggctacaggttacagtatagcataaacataacttctatatgcactaagaaaccaaaaaattcatgtgactctctttattgtgatatttgctttattgtggcagtctgcaactgaacctgcaatacctccaaggtctgcctgtacactcttctaatcatcagggactaaagggatgggggcagaattaatgtgcaacttatgcactggggttgaaggaagacctaatggaattgtagaattctgttcatggctgtgtaagccctgagtttgtccaacctcagagtgggaagaagagagtattcaatgagaagactctccattgagtcccctctcagtttatgcaagtccatccaggtgggcaactggaatcttctctctgttctccctccttcatttctcccacagcttccttggcctctttccattcctaggtgtcccctctggatccatgccccacgctggagggacatcatcagatctttcagctcctgcattacactgagggttttagatatctcaggttcttcaaactgtaccaatgactttttcttgctcatcttgacagctcttagagaataactttcatgtgttgttatgccaatgaattatctcctttttattggttcttctggaaggaatgagggagataaagaaagaaggagccaaggaaagaagaaatccctatcttgtcaccagtggtatcaccactcttcgccattgctggagcatggctgaaactccattgctgggagccgactgaacttccttactcaaaaccagacttacatctgaaattcagcctggtgatgttgttgggaaacacttctcccagagtatctgggtggggtggagggactctcacctccaagtgaaagggattcccaccaccaagaagaaaagtgatggaagaattgagtcagctccacctccactccacccccaagatatgtaacattaccagtctggaaagaatccgggtcatacttgtcagttcccgattcatgttgtaaataacggtttcatttcagcaaaataacatcatccttcccattaaaggaatgttgctgttttaaaatggtactggtttcataacatttttgtttttaatttgtaagtgtggcttggttttgtagttttataaaagctataaatataaggagtttttatctactttggtaagatctgtagtcaggactgttactatcatttctattgagtagtgatgaggatgaaatgaaataatgcagagaaaggtgctcagctccctgccaggcacataggaagaacttattaatttttactgaatgctgatgttgttttagaatcatatatattacaacaaaaataattcaagttattattgaaggtctgcaatatttgtttgtttgcttgtttgttgttttttcagacagtgtctcactctgttgcccaggctggagtgcagtggtgcaaccatagctcactgcagccccaacctcctagacttaagcaattctgccacctcagccttccaagtagctgggaccataggcatgcaccaccatgcctggcgaattttttgcagtggaggggaggggtcttgctatgtggcccaggctagtctgaaactcctggcctcaagcaatcttcctgccttggcctcccaaagcactggggttacaggtgaaacccactaagatcagtcttttttttttttttctttctggataagctacatgagtcaagcttgaggatgaaggggctgagccactgggcctccaggaggctgggtctcactgggagggaacgagttgacctaaaggagtagccactaactcacgaatgcccactacacaatgggaggggtgccatgtaaagagaggaagtagaaagtgcaagagggtggaaagagaagagaaaagcagattagagcaaaggaagggcattaagagcacggagggagctttcttactcatccccgttgctccagcatggctgaaaccccatttctgggaaccagttgaacctccttactcaaaacttcagacttacatctgaaattctctccacccagtgatatggttggaagagcacttctcctggagcattttggtggagtgggagtttctcacctccaagcctttctacctgccaggaactgtacctctactccctattcacacacacctaatgaaattccacccattcccccagatcctcatcataaggagagagcatgtaggtctacttggagctggtatgaaaatctccccaaagccagggcattggtggattgatattaccatttcttaccctccccttcttggttatcaagacagaccgcagagtggaggcctagtaccctggggggtggcatctgcaggatggaggcccaatgccctggaggttggcatctgcagggtggaggcccagtaccctggagggtggcatctgcaaggtggaggctcaatggcctagagggtggcatttgcagtgtgggggcccaatgccctggagggtggcatctgcagagtagaggttcagtaccccaaaaggggcattggcagggtggaggttcagtgccctggagggtggcatctgcaggatggaagtccaatgccctggagggtggcatttgcagtctggaacttcagtaccctggagggtggcatctgcagggtggaggcccagtaccctggagggtggcatctgcagggtgaagactcaatgtcctggagggtggcatctgcagtgtgggggcccaatgccctggagggtggcatttgcagggtggaggctcagtgccctggagggtggcatctgcagggtgaagactcaatgccctggagggtggcatctgcagtgtggaggttcaatgccctggagggtggcatttgcagtgtggaggccaatgccctggagaggtattcaagagatcaacccacctcagcattccaaagtgctgagattacaggggtgagccatcacgcctggccttgcctggtgttcttaaaagaagagatcaggacacagacacactgagggagaccatgtgaagacacaaggagaagacagcctcctacaagccgaggagggaggccgcagaagaaactaacccccctacaccttgacctgggacgtccagcctgcagagctgccaggaagcatacttctgttgtttaagccgctccatctgtggtcattcgtttggccaccctagcagactcatacacctttggaccccaaaagtcgagaactgacgtgaacttccctgtgttccactgtgctgtcccttccaccaggcggatcctgcccagttggtctgaagaaggtgggcaaacgctgagcgtcacccccaaccccagccaccattctgccccttcggactcgccccccaacattggaggtggaagtgacatggatcagcagagggggcccgtgatctgggcctccctcagtgccgacatcagcaggagggacctggggcaacccccgctgacatggtttggatatttgtcccctgcaaacctcatgttgaaatgtgacttccaatgttggaggtgggcagagggaggtgtttgggtcatgggggcagatcccttatggtggcttagtgcctttcctatggtcatgagtgagttctctctctgttagttcacgcgagagctggttgttcaaaggcgcctcctcctctctctctctctgacgccctctcctgccacgtgacattggcctgctccaccttcaccgtccaccatgattggaagcctcatgaggtcctcaccagatgcacatggggccccatgcttcttgtaaagcctgcagaatctgaggtattcctttatagcaacacaaaacaaactaattcgtgcatgcgtctgcactgggttggtacttcgtggtgtactttccactgtcggcccaggcacagagcaatgctgggcgctggcccctcagtgactgtgaattcctgcaggtagccagcccagctccgcagcctccccagagcagcccaccatgcctcccctcaccgcccgtgcacccagggacacccacctcccagtcacctaccccactgcagtgcctggccctgtggtgcagggcgggagggccagaggcacgggtgggggcataagagctcctggggctcagcttggctttacaagggtccaaatggaccgtttcatttccctaactagccttccaggaacacttccacacggggccataaaagaaggtttagaaccaggaacttttagaagggcttttatctctgtgagtgtctattgagttttacaccccttcagggtatctgttggctgtgggcggagagggaaaaggcctctcattaaatgtacaaaggaagcagcggccagaaatgcgttggactctttgctctctggctttcaggtaattcttgggagttttaaaactcagctcccaggggagagcaggtggcagagtgaagagcagcgccctctggcagctgatggtgatttgaggcctagaggaggtccaggcagcggcctgcagcaccccaccccccgccaaggcctcctgagggccacaacaggcagagacaaggagctgacccatcggaggggggcatgcccaggcccacgtgcacctacaagcatgcaatccccacagacacctgcacacacacacacacacacacacacacacacacacagcatgcttgcagtcactcccaggagcagggtcacccacagggacctggaaacacccatcccaccttccttggaccttctcttccctggtcaccaggcctgcacccaattccaccccctgggccctcctttcactcctcacctccctcccatcctctctctcttcccatactcatagtgacaacaggccattttcagaaaaggtggccgggggcagcgccattgctcctggccgctctggccaccacctgctgagcacatctgaggacaagctgcagcagccctcctgggacccaggctggattccatagggtcaggcctgatgccagtgggcaggtaagggatggcaggcctgagagagaggctctcacctccctcccttccaacttacagccagccacaccctcaggctctggaagcgagtgcagccagctacacaatgtgcccaggtgcccccaggtccctgcatgtttccccacctgtctcagaacatcccctccactgccacccgtgtgttaatgccaaaccatgggctccaaggccccagcgtagaagcaagggttagagtaggcttagagcagcagcgcccagccaagcggtcacactagctctgtaggccacccagttggcacacgccaaagccaggcacggcagcatgctcttgggaacacgggctggagagctctgactccagctcctgcgttacctgcccactgactctaagcctttgtttcttcatccgtacaatgggagagaatcacagaagtaagtcgcttcgcaggcctgttgtaagagcaggcaacacactgcataggaagtgctgagcaccacgcctggcccacgatttggctctcaactccaactgtcaccatcttggctatcatcctggctaccgctttcctgctaacattgcatatcctacccaatgtaaacaaccgcccagtgacccgcaaagggctcaggcttgtccaagagccaggcaatctacattttcccaccaacctacggggacaggcagcaaaagcactggcctacgctcacctctgtagcccccaaccacaggactccagcaacatccgaccctgggcctggctgggccccatctgtctggaagtcttacccggttctttctctcactctgaggcctccagataaccgtggagaccaagacagccagagccgagctcgagaaatcattccgttctgactaggaaggacgctgacattcccgagtctatttccatctcggggctcagaaattttccagagacacccttcgctcggcggtgaaggcaggtgcctgccagaacagtgcccacaccccctgcccctaaaaccctgcaccccgagccctcagtgaacacaggttgtaacttcaaaatcaggaaacggaacattgctaattctcacggcagcattaactcattcacttgcacatatggggtacttggatcccagtaggtcttctatatatataacttattatacagtaggtgcaacttgggagaattaatgttgctataggaacattcggatcaaggctggcttccagagggaagagagaaaaaataagttttcctcctcagtgtacttctctgttttgagtttcagagaggaaggagcggtgtaatcaagtcagatgaggcaaggaggggcttcccttagtggtttggagaaggtgagaattcctggaagctgctcgctggggagagaagacagaaaagctcagaacatgagccaagtgccctcgtggctaagaggaccaggaaagggacttcaggggccagattcccccagccctggccagcagctccaggtgccaaagctggaacatagccttggggtgatcttcccctgagaacgggctgaaagccacctaaaaaacagcatcctgtgtactcagtcccccagccccacacccctaagtctcattcctcccaactttccatccttcccaacgataaggtgaaagcaaaggggaaattgaaagtgagtttcgtggtctacactggctcctggatggaccattgggaggacccatccctggctgaaggtcttaagcaggcagcgtattggaagcttgcatccaccatagcctgtataactgagctctttcttccggagcagcgattttgtgtccacctgtgaatgctccacctaaaccaaactatgtgttaaaaacccgggcacttggctccaaacctcacctattagaggttttcctgattggtaaatctgaacatgcatcgaatcccccaagagctatgagacgtgtaattctactatctcctttgcagacgacaggggtcctaaatcgtcctcccccactaccttccctggcacatctggggatctcagcaggctatgggtgtcgtgaaggtcacagcacagccagacacaacacctcacatacaccccaaacacacaccccaggatgactgcaccccccaggcagctgggctggctcctctcagctgccttagcagttggcactgtgctgggcaagaggagatggctcagaacgggttggctgcaggagtggatgttgagcccaagatggcagcaaagagggaaagaaaagatccacattcctaacaccattttccagctcagtgttcgccaggtgcccactcgtaccaggtgctatcttatgcctgggggatccagagataaataagatactacctctgctctcaggatgctcacaggctggcgcggtggctcatgcctggaatcccagtacctaggaaggcacaggaggtgggaggattccttgaggccaggagttcaagaccagcctgggcaatatggtgagaaccccccccaaccccatctttacaaaaaataaaattgtttaacttagtcaggcatgatggcccatgctcacagtcccagctactggggacgctggggtggaactactgcttaagcccaggaggctgaggctgcagtgagctgtgattgcaccacggcactccagcctggccaacacagccacaccctatctctgaaaaaataaaagaaaataagaagatgctcccagtccaccaaggggaggaagaaggagaggcctggaaataaataaccaagggtcatgtcttgcttcctgcctccccaggaaccaagcctaggtagggctgaataggcacctgcaaatgcccatgcaaggaccactgagatggcagaatggcagggacccgcccaaggagaagtaccaagtgtccaaaggagcctggagtggtgggaaattcattctgaacaaggaggcgtcgtcccacaggctttggcccgtcccctcccacccagctgaccagagacaacttgcaaagtccaccaagaagcaaagcctcctttgccattcagtatttcagacacattccacacaccacgacgggcaaggggccactgccgcccagagctgctgctttgcatttcatctgaagctgtgtctacttttaaaaacatatataacagtgaagtggaatctctaagcgctttccgggccactccgctcggaactgcgttgccaaacatcctaaccatttggaggggctgagtcctagagatggggaggaaacagaacagccctctcctcggggaaggtgagcagagaggacattagcattcttctccttcctgcttctcagatcggatcatctacgctgttaaaataaaggtggatttgcagcatcccagagtcaacaatttgccaaatttcatgtcacagaccagcaagggagatgagtctaatacacccacagatcctggttactctcagatgggggcaggcaggtggtgaagggttacctgtttaatcatcaaaagcccaatgggtctcccgggcattgctgagagagaccctcttctagagctcccaggcccctcagagcctcctacacatttgtcactctgctctgtgtcggaaattcttctctttgttcccttagctcactttaactcaagtgtggcgtttttaattctgtctgtggcatgattttcaaattaagcagttggtgtgctgacagctggtgttacaactggcctattccctccccccgccaccccacccacaaagagccaacgtggtgggtgcacagcctcgaaggaactcacgcacgttccaaacacccatctcctccacgggggtggtggagagttgtggggagtgcttccgaaatgggtgagagtgctgagaagctaagatgggaacagactctcacagccctggggacatcctggggtgggacaggatgcatccgaaaaatactacgctccactttccaacacacctcctgggacacaattcaggtccaaaacaccctctacactgtcaggatacctccatgcccctcatgggtcaggtcacaggccatggctaagcaccagcgcccctgcggtgcctgtgtgtcccgtgggtgttacaaatgagaattccaagcagagtccgatttgaaagtcccatttctcttattcttttctcttgttctctgtctcatcacagccctgggactgctattcacctgacaaccctggacaggtgaaggcgttcaatttcctggggagtaggcatttccagaattttgcttagacgagagtactcagaaatggtccctaaacatggaaacaaagttgtgaaggcaaccccgaaaagacctggctttatggcatatggaagtaactatgcacacttccaagccacatccatgccagttggccagccacaacctgtctccactcccacgcccccacctcccagcccatgcccatcattgagctccccttgtatgcaaagcctactaactttagagagtaacaaacagaagtggtcatgccacctacctctcagcctctggcaatccttgacatcgtctaacttaaccatagctgatggtgccttctttgttttttcttttcctggaggcatttttatcaccttcataatttaacccatttctgaaactaagcaaatgttgcatatgctagctgtaaagtggaagttttgaaaataattttttttgaagtaaggagtatcctagatctcagaatctgtaaataagtcaacaactgtccaggcacagtgtttcacccctgtaatcccagcactttggaaggccaaggttggagaaacgcttaagcccaggagttggaggctgcagtgagctacaattgttccacagcacttcagcctgggcaacatagcaagaccccatctctaaaagaatttaaaaattagtgagatatggtggcacacacctgtaatcctagctactcaggaagctgaggcaggaggatcacttgagcccaggagttcgaggctgcagagctatgatagcaccactgtactccagcctgggctacagagtgagactgtctcttaaaaaataataataagtcggtcgggcacagtggctcatgcttgcaatcccagcactttcataggccgaggcaggcacttgaggtcaggagttcaacaccagcctagccaacacagcgaaaccccatctctactaaaaatacaaaaattagccgggcatggggacaggcgcctgtaatcccagctactcaagaggcagaggcaggagaatcgcttgaacctgggaggcggaggttgcagtgagccaagattgtaccactacactccagcctgggcgacagagtgagactccatctcaaaataataataataataataataataatgtcaacaattaatctaagtatctaacatcttattcatatcaatacaaagctgagatttctgcataacaaagaatgtgtcattcctctttgcaaagttaaataaagtgttcacaagaccgttcctccaatggaacttttctttggctcctatggcttccaggaaaatgcccagagtcccaccaaagcctacagagcctgcctgattggtctgtgcctccccgcagccatgatagcccaggcctcccctcccctggcctttccactccttaagcatgcacacccctccctgctctacgggtagccttgtgcccacccctctttctctatttgaccaactctgcctcattcttttcattctacataaatgatgctccttcaggaaagcaggccttttcagactctactacagcctctaagaaaccccactcttttccttgagagcatgtttcattcctgcaaatatgtaattacttgggaaattataattttactacctgtctaacttcatatgggcaagaactatccatttttctcaccatggtatctcccaccctaaacaaatccctagtgcatagcagatcctcagaaaatgtattttttaatggagcatggatctccattattgagtcatgcacacagttaggcttttagaaggaaaggggatgaaattgataggttagacctcatcaaaattaaaaacttttgttctgcaaaaactctatgaagaagattaaaagataagctctagattaggagaaattgttgcaaaccatatatctgacatgacaaaggactagtatctagaatacataaagaaccctcaaaactcaacagtgaaaagaaaagaaactaatttaaaaatgagctaaaaaacatgaacagatacttcattgacaaggatatacagatggcaggtaatcacattgctacaggaaaggggtctggatccagaccccgagagagggatcttggacctcacgtaagaaagaattcagggtgagtctataaagtgaaagcaaatttattaagaaaataaagaaataagagaatggctactccatagacagagtggccctgagggttgctggttgcccatttttatgtttatttcttgattatatgctacacaaggggtggattattcatgcctcccttttttagactatatagggtaacttcctgaggatgccatggcatttgtaaaccaccatggtgctaatgggagtgtagcagtgaggatgaccagaggtcactctcatcacatcttggttttggtgtttttggctgtcttctttattgcaacctgttttatcagcaaggtctttatgacctgtatcttgtgccgacctcctatctcatcctgtgactttgaatgcattaaccatctgggaatgcaacccagtagttttcagtcttattttacccagctcctattcaagatggagttgctctggttcagaaacctctgacaacatgaaaagcaaagtacacttggcagtaggttttgaaaagtctattttctttatgttcagagattctacttctgcagattgctccaaaggaaatagaaatgtgaaaaatgatttcaagatccaggaagtgtatggtagactggataaagaaaatgtggcacatatacaccatggaatactatgcagtcataaaaaaggatgagatcctgtcctttgcaggaacagggatggagctggagaccattatcctgagcaaactaaggcaggaacagaaaaacaaataccccgtgttctcataagtgtgagctaaatgataagaacacatggacacatagaggaaaacagcagacactggggcctatcagaaggtggagggtatgaggagggagagatttagaaaaaataactagtgagtactaagcttaatagctgggtgacaaaataatctgtacaacaagcttccatgacacaagtttacctgtataacaagcctgcacatgttcccctgaatttaaaataaaagtttaatttaaaaaataatgtcaattgtagcattatttacttacaatatttaaccctctaaatctccaactacaaggcattagttgtgcaaattgtgtttcatccaaaagaacctaaagggcaggcgcggtggctcatgcctataatcccagcactttgggaggctgaggccggtggctcacctgaggtcaggaattcaagaccagcctggccaacatggtgaaaccccatctctactaaaaatacaaaaagtagctgggtgtggtggtgcatgcgtgtaatcccagctacccaggaggctgaggcaggggaatcacttgaacccaggaggcggaggttgcagtgagctgagatcacaccactgcactccagcctgggcgacagagtgagactccgtctccaacaaacaaacaaaaagtaccttgaatttaaactcctccaaggcgaggatttttgtgtgggcatcagtgtatcccaaatgccttcatgaaatgagcttcattaaatattatcagattggccaggcagtggttcatgcctataatcctgtcactttgggaggccaagataggcagatcccttgagcccaggagtttgagaccaggggcaatatagcaagacccgtctctactgaaaacaaaaacaaaaacaaaaacaaaaaacaaaaaaaaaaaatctaaaaaaaaaaaaacaagataattagccaggtgtggggatgtgcccctatagtcccagctacccagctacccaggaggctgaggtgggaggatcacttgagcccaggaggctgagactgcaataagccatgattgcaccactgcattccagcctgggcaacagagtgaggccccatctcaaaaaaaaaaatcaatatatcagattgattcaacctgaatgatgaaacactcagcaccacggaaaatcatgacatgagaaaatgttcacaatacagtaagtaaaaaaaaaaaaagaagaaagaaagaaacagattgtaagactctacatacatcataaccacagttttgtttaaaggaaaagaaatatacgtatctttgcatattaaaagactaaagcaaagtaaaccaaaacattagcaaagactatctctggtgaatgagaccttaggaatttttcttttctttctttaccttctttcatttcttttgtgtgtgtgtatgtgtgtgtgtgcgtgtattctatataaagtattccaaattttctacaaataacatttattcgtttttcaaacagaaaataagacagtaaagtgaggccagacacagtggttcatgcctgtaatcccagcactttgggaggctgaggcgggccgatcacttgaggtgagaagttcgagaccagcctggccaatatggtgaaacttcatctctactaaaaatacaaaaattagctggatgtggtggcaagcacctgtaatcccacctgcttgggaggctgccacaggagaatcgcttaaacctgggaggtggaggtttcagtgagccaagatcacgccactgcactccagcctgggtgacagagtgagactccacctcaaaaagaaaagaaaagaaaagaagacagtaaagcagtttggaatccatgtggagttgtgatttctgaagcaataatggaattggcagggatttgcagggaacgccctgcccattggccaacagcacacctcccagcaattcagcagtttctcagactacagtcaaaatggcaccttcgggatcttatgcataaaccggcacctattgtcctcttgtttactgagtatttttccttaaattgaggctttttatttaaagacatttctttacagggaatcttgatcacgaccatgaagggaaatccgtatcacttgtcataaataaaatgaaactgtacaatagatttcatttctttaagtggccttatttagctctagctgaatactgtcgcctgcagaaggttctgagtcggaggcctgctccctcttttgtgacaaaagaagattagcaaatgtaagagaagtgggcgttaaagacatatctgcagcaaagaagcgtttcttctgatattgtccgaaggcttgaaagtggattgaaggaggaatgacatgttgaagccgcatcgttgtctggggtaatacgcaaggttcattgtcccatggccacggaaaattgggactcagacacactagagtggggttaagagaggaagtttaataggcaaaagaaagcgaagagctctctgcacagagaggggtccgggagaaagtgggttgctgcttcagcggtgaaatgcaagaggttttatagatgagctagaggaggctgtgtctgatttacgtagggcataaacgattggtcggaccagatgtgtcatttgcataaggtatgaagaagctgaccaccccaccctaatcttttattatgtagatgtgttctctaccttgccggcaccatgttgcctgggttctttttttttttttttttttttttttgatggagtcttgctctgtgcccaggctagagtgcaatggtgacatctcagctcactgcaacctccatctcccaggttcaagcaattctcctgcatcagccttccaagtagctgggattacaggtgtacgccatcatgcccagctaatttttatgtatttttagtagagacagggtttcaccatgttgaccaggctggtctcaaccttctgacctcaagtgatccacccacctgtacctcccaaagtgctgcgattacaggcgtgagccaccgcgcccagccaactgtggttctttactgtacatgtggtgacacagaaaagggaagatggagcctccatgttgaacatacctggcttccaggtagcccttttctattggcgcagttaccagcacttacccgtgcaagctcctagcttgctcatttatgtttgcagctcgatttttcaggctgctctttgttggtttaggggctgctttttgttgaaagggaacccttgcggaggacttgtttactctcactatctgcgtaactaatttctttccagctcctgtatcagtttgattccatgtcatttattgccatgtccctgtagtacccacaagcattcctcaggctatccgtggtaggcattccacactcccgggctgactgggcctcactgctgagcctaaatgaagccctggggtgcaccagcctctgccacgctggggatccactgtccccctctgcactgtcccatacctacagccctactgtcagaggcgtgtgaacaagagcaactccatcttgaataggggctgggtaaaatgaggctgagacctaatgggctgcattcccagatggttaaggcattttaagtcacaggatgagataggaggtcggcacaaaatacaggtcataaagactttgctgataaaacaggttgcagtaaagaagccagccaaaagccaccaaaaccaagatggccatgagagtgacctctggtcgtcctcactgctacactcccaccagcgccatgacagtttacaaatgccatggcaacgtcaggaagttaccctctatggtctaaaaaggggaggcatgaataatccaccccttgtttagcatatcattaagaaataaccataaaaatgggcaatcagcatccctcagggctgctctgcctatggagtgtcattcttttattcctttactttcttaataaacttgctttcactttatagacttaccctgaattctttcttgtgcgaaatccaagaaccctttcttgggttctggatcaggaccgttttcctgtaacattaccaccctcgggctccaggtgtgggacagtgcagagggggacagtgagaagcccagagactgaagggggcgctgactccgcaggtcactcttagaccttaaagagtatcttctcccaccctagggaaggaacataggtgagggaagcagcgagctctgctctctctagcctggtaaaggtgtgagatgtgagcttctggaatgctgggcaggaggaactggggtgaatgatttgcagtcatgtttgccagttgcagaaccaggaaaaatgatcctttctttcctcgagtgctatcaagtgaactgcaccagctccattagcgctggaagcatccatatgaaattatggggcttatgatggctttgtctgggaaactgttcatttctgatcggaagttctattacacatgaatttaattctaaacagtgttaccaacagccccaaatgatttacattttaagcaatcttctttcattatctcataccttgacggggagcaaaagatggatttttatgggcttctatgatgagaaatgattaatgcccctaaatgggtgcctgtctctattccagccattctgacaaggggtccctttcctcaattctgcttcagtgggcatatttgaaagctgagatcaaagaaacggcatggagaaagaacattacaaacttttcttaagttggatctaaataaggtaaacatttccagtgagggcattgaacaccatttggtacctaacattgtctttcatccagaaagagagaggaaagagggagaaggagaaagtttgtccacttataaagccaaaggctgtagtgaaagcttgaaaatgtatgagaaagcccagacgcagcggctcacacctgtaatcccagcactttggaaggcctaggcaggtggattacctgaggtcaggagatcgagaccagcctggccaacatggtggaaccccgtctgtactaaaaatacaaaaaattagccagttgtggtggcaggtgcctgtaatcccagctagtcaggaggctgaggcaggacagtcgcttgaactcgggagacggaggttgcagtgagtcgagatcacaccactgcactccagcctgggcgacggagcaagactccatctcaaaaaaaaaaaaaaaaagaaaagaaaatgtatgagaagcaatttgagtttaatctttcagggtcagggagagagagggcactaccctccagacagatgcaaatctggaatgttgcctcccatagtgatgctgtaacgaggcacctcaaaggtaggaccagatgaggcatgccagctctcccgcctgctttacctctgcctttgggatcattctttccagggggcacctggacaaccagctcagaaacaccatgagggtaaggttgttggatgaactgctacaaggacacttttctggaaacctctgttcacgcaccagaatcagatgggacattcctcaagagacagattctcttctccagttccctgcagtgaattccttcccctcctcccgtcaaaggaaggggcgtctgtttgaggatcgtggcctgagtgagcccttgccattgaatggttggctgagaggctgagtcactgggaggaaaacgtggagtgagttgtgtctgagacctccccagagagaggggccactttagactccaaccaaatcatagcccaagttcccagcccaaaaggtaacaaagtaaacaagatgcaagaaattcaggtgctctgattttcaaattgtagaaaatatgcaaaaacagcctcagaaaaaaatcatctttgcagcatcagaaaccctgccttcctctaggattctgtggcttgggcggcctcagaggcactacccaaaaataaccaaccacaagtcaaggaaccagaaagcaaattgagctgcagaacgtgaacggcctccactcagagaagggggggtcatgtccttgaagcagggcccacggttaccctgagccccctagaacagtcctccctccccctacagttcatggtatctttagaatcaaggctacaaactgcatgaatagcgagtaattcaattaactctatagtctgtgatgaaaaaaagggccattttgctagctctagtggagcactagtttaaccctggtgctcaggaaattcccaggccagacagcatattaaaccagctcttcaacttaagaacaattactgtcatttatcagcctgaatagcaataatgcacaaatcgacacctttcaggaggcaaaaagctagcgaggtgtaatgatatgcaaagccacagcactctacattttgaactgtctccatcccatcaatacatctcctactacctacaatttatcaatacaaatgtggtacccaatgaaggcaagaccaagaagataaatatgaagagggtggggggaaaaaaggctcaggaatgtttgaattttaaaatgatgaagtacagatcacattcttaaaacattttacatgcaatgacccgatcacatcaagttctctcctgaaagaagaaacagaataaggggatttttctaccccaaggttgcaggcagatgcagctcttctcttccatttcccagatcatgtctttacgtggaagtgtgtgattctttaggtctctgataaaagtaaataaagatattgctaatcatagtgatgaattttcatagagcctttttcctaattactttcacatctatctttttttattttaatttaatttaattttttttttttttgaaacagagtctcactctgtcacccaggctggagtgcagtggtgcaatctcggctcactgcaacctctgcctcccgggttcaagcgattctcctgcctcagcctcccgagtagctgggactacaggcacgcaccaccacacatggctaatttttgtattttttagtagagacagggtttcgccatgttggccaggctggtctcgaactcctggctacaagtgattcgcctgcttcagcttcccaaagtgctaagattacaggcatgttattttaattttataatatcttcaagaggtaagataaatattatgatacccattttgaaagaaggggaaactgagacatgctgtgattaagacactctctacatcagtcagacactggcagagcaagggctagaaactgggtccggactcccagcctgtccctcaaaagtcacagcacatccagggcaaaacaaaggcttcccagaagtgctcatgaggatgtgcaggaacttcagtacatgtagcaccagtgggagtaggagccgcgaggcggggcagagcagagacaaacaattttacatttcaggccaggcctggtggctcacgcctgtcatcccaagcctttgggaggccaaggagggcagatcacttgaggtcaggagttcaagaccagcctggccaacatggcaaaaccccatctgtagtaaaaatacaaaaattagccgggagtggtggtacagcacctgtagtcccagctactcaggaggctaaggcaggagagtcgcttgaacctgggaggcggaggttgcagtgagctgagatcatgccacgaacctgggaggtggaggttgcagtgagctgagatcatgccactgaactccagcctgggccacagagcgagactccatctcaaaaaataaaacaaaacaaaacaaaatttcacatttcaaaaacagatgaatagaatttcaagtctgcagctcacacagactgagcccctactgtgcaccaggcgctgaaggaggcaaagacaatgccagcccagacccaggctctgcttgtggtcctcccctcccacatacccagccctccccaacacacactgacattttgcttagcagcatcatttagctggatagaatacatttactttctgtggagggaagccaagaagggtggtacctaagacaggaaacattcctacaaaggcaacagggacagggggtcccatgggagctcttaatgcaagtcaggcaaacaaggacctccttgttgaaactctgcacccactaaacactggtgcctcaaggagccccgagggttgtttaccaccgcagtcatttttatccttcaccttccacccatttcacaaacccatccaggccctcccagccgttttatcacagacgctcatcatctcagtccaggaattttgtttttgtttttgttttgttttgtttgagacagagtctcactctgtcgcacaggctggagtgcagtggcgcgatcttggctcactgcagcctccgcctcctgggttcaagcgattatcctgcctcaggattctcttgcctcagcctcccgagcagctgggattacaggcatgcgccaccacacctggctaattttgtatttttagtagagaccgggtttcaccatgttggccaggctggtcttgcactcctgacctcaggtgatccacctgcctcggcctcccaaagttctgggactacaggcatgagccactgtgccctgccctcagcccgggaattttgaaatggcgtccaactctagcatgcaaactcatgccctctctctaagcaatattttcaacctatttgaaaaggaaaatagtgattggtggtaaaatgtaaaggatttgtttgcttctatgtttctttggaagattagctgtttttttttaaatccacttatctttatttcttaaggtaatacctacctaatttttctttttctcttttttttttagagacaggctttagtgcagtggcatgatcttagctcactgtagcctcaaactccagggctcaagcgaacctctcgcctcagccttctcagtagctgggactacatgtgcatgccaccatgcctggctaattttttttacagacataaggcctcactatgttgcccaggcttgtctgaaactcctaggctcaagcgatcctcccaccttggcctcccaaattgttgggaatacaggcatgagccagtgcacctggcccctacctaattttaaatcatatacaacacacacacacacacacacacacacacaaatgaaacaaacatatcttctaaaagcactgagataatcatttgacgaatgacatctcatgtcttaatttttcaatgggtaaaggaaagccctaaacaaaattcttattttctgacatcaaataagaatgtgggtgcatttccctccctttataagaaattacaccttgctcttactattaaattagaataccctctcttcttttctaaaatttggctgctgtacaataaatacataaatcaaagagacataggatccagacgccaattggcagacggcactatgaaataagcaccaggacacaggcatgcggaagtgttacaacctgttccaatctgctccctgttcccccttaaaacaaaagaggaagagagtccaaaccctcctacacacacacatacacacacacacacacacgcacacacacatgcacagagcaaagtttaggaggtttaaatagagcctaagctgctaagaagaagagccacccaactgcttaggacctgggtttctcactcttgccgctgagctgcaatatttgccgcatcttgccaagtgaagatggtgtgaacctgtcatgcaactgctgagaagtttgggaaagcctggggttttgccagtattgttatcatcctcgtcctcattgccatcaggccagagaaattttccaagcccttgagcttggggtctttctcaacagccatgggatggtggccattagaattacctccaatattcatgtgacgaaatccattcagagatacaggggaggcagagaataggtgggtgtagcaattaggacacttttggttgcaagcaacagaaagtccaacctgaaaagggttgaggcaaaagataagatatgggctcatgtacgtgaaagatccaaagagtaaagtggcttggggcaggaatcagttagaaacctaccattcccaacctctcctactctgcttcctggggtaaccttcttccccaacataacacttggaccagcggaaaatgagttcaaaccaaagctcagaactgacactgattggcccagactgcattgacttgggtcatgtgtccatgcccgagccaatcactgcagccagagggatggaatgcatcgactggcttaaactaggtcatacgcgcctctctgcagcatgagggtaagatcttcaccaaagcatgtgggcagggagaagtgatgtgtgagccccaggcggcaaaaccaggaggactggtgttgggaggtcaaatgcaacaaacgcccacttcaagacgccatctttggtcagaccaaaaatctccaattccattgaccaagatatcgtacccagagttcactcgcaatttgagtagagaatatagccgcttacttgtgttgaatgtcctataccttctacatctaggctgaatatggcccctgcatcaccaaaatctgatggattcacataaaggactcctgaagataagttttgcactcaccagtgtccggtattttaatatctgccattcttgagttataaagctcaggccagaagattaaacagtcgctggtcaagaactaaagaaatgaggtgaactgcaggaccagtcacttgcactttatacatttttttaagtttaattaagattacaggtcagattaagtaatggctttctataagagatagataaacacagagacagttgcaccaagattgtttaaagaaaccacttaatttcaacttcaagatgttctttttttcatccattaaactgtatttgttgaaatataacatacctatgggcaagtgcacaagttgtaagtgtacacctcaattcttatcccaacataaacacattcaagtaactgctattgaggtcaagaaatggaacattactggtgccccagaaactcctttggaaccccctcctaatcagtatcctcccctttccacccaaagataactactgtcctgacttctaacaacgtagatgaattttgcctatttctggaactttatataaatggagttacacagcgtgtactcttatgcctggattccttctttcaaaagaaagtcacccaagttgttacatacagtacagctcattcatttttctgtttaataaatcattacgtggatattctgaaatctgcatatgcaatctatttgggattatcatttaggctattgttgtgaatgttcttatgcatatgcagacatttctgtttctgtttctatgcaggaggggaactgatgcagtttcacctttggtaaataaaggcaaatagtcttctgacgtgtatacaccaatttatgcccctagcagcagtaagaccttcctgaacaccattgcccactagttactactgccttgatcagttcagctctgttcctaactatgaccccactaaaagacgctatgtgtagagctcgggaagcagccagagctcaatttaaatcctggctttgccacttactagctgtgagtgtttctttggagaatttcacttagcctcagattcctgatctgtaaagggcctgtaagcatcatgttcttgcaagaatcaaattgtattttataaaccaaagtgctttgcaaactgttaaactgaatacccatgttaggtattagaagtgggtccctgaggccaatattacagtcaccaagtgttaagatagaattctccccacagcattagaaaggtagaccatagcaagttagaaagacctgggttactatatgacctttgaggagtcactcagtctctttgatcctcagtttttttatctgtgaaattagggcagcaaggcttacctgagaggattgtgaagataaaaagagagagggagagaaaggttgagagaaaaagagagagaaagagaatctaactgttgattaggtatctacaagtgctcaaataaccatggtcattattagtaaaagtctagaaaatatgggagaaaacctggttccctgaatccttttcactgatacgctcatctttcatgataaaggtgggttacatgaaaaattatcaattgataaaatttggcttttccgtttttgttttgttttctgcctgtttcacccatttaaagactcaccatacccaggctttcttaagatccacctccttaagaaaaacttgctatcaagcctggcgtggtggcgcatgcctgtagtctcagcaccttgggaagccaaggcgtgcagctcacttgagctcaggaattcgagacagcctgggcaacatggtgaaaccctcactctacgaatattaaaaaaaaaaaaatagctaggcacagtggtgcatgtctgtagtcccagctactcaggaggcagaggtgggaggatcatttcagctcaggaaatcaaggctacagttagccatgatctgccctcaagcctgggcaacagagtaagatcctgtctcaaaaaaaagagagagaaaaaaagcttgttatcgggaaaatgtgaaatgtcagcattcaataagtcaatcccagaatatcagagctagaagatacctgaaggcatacaacccattcagttcattgtacagatagtgaagctggggccagaaatctaaagtaacaccactggttagtggcagagccagagctaggtcctgacaaccagcccagggctcattctttagtagcttaataccaacgttaatctgtatctccagtgtaaataaaagaattggttctttcttaaagacctttcaagcattagagaaagagttcaatcacatgtaattgacccctaaattaaacaggccctgctaaaatttaacgcacagacatagacaaaaaccatcagtgtttatattttaaataatatctttcttttaaaaaattggagaactgcttctacccatgacagaataactgatatgagacttgccttcctgccaaaaataactataaaactagacaaacatatgaggcaactgttttcagacactgaacaacagacagtgcatcactgtaattttgagaaaaggcatacacatgaggtgagccccactgttcatctagctttctggctggaggcacctttctgtcaaggcacaaagatgggaagtccaaatggagcaatagttgcactgagctgaggaggtggagattggagtcctactttgttgaaatggctggattttatgaagcagaataacagagaatagtgatcttcacaaagaacatggggccttggctgcgggcacagaagtgcatgcagagtgagattccaggaagcctagcagaagactcctactatggagctgtgaatggtatggtgataccagaggtcatgcactgctaaaaagcactgaaattttggctaagccaaggtagagaaagttcactgaatgccccaagcctccagctgagaccttgaaaaggccatgcctttgggttaaggaccaaggccctaagtgaaggcaataccgtaagactcagctcaaaattaaaatatatctgaacaacaaattaagccaaccctaacagagcagaaagaatctaccaataatgttactgacagaacaaacattaaaactctttaaagaaaaatatgacataatttggaatctccacagtgcattattcacaatgtccactatgcagtcagaaattactagacatgaaaaggagcaacaaaatatgatccataattttttttttttttgagacagagtcttgctctgtcgcccaggctggagtgcagtggtgctatttccactcactgtaaactccgcctcccaggttcatgccattctcctgcctcagcctcctgagtagctgggactacaggcgcctgccaccacgcccaggtaatttttttgtatttttttagtacagatgaggtttcaccatgttagccaggatggtcttgatctgctgaccttgtgatccactcgcctgggcctcccaaagtgctgggattacaggtgtaagccacagcacccagcctataatccataattttttaaaagcattcaatagaaaatgaccccaagaataccctcatgttgaaactagtaggaaaagtctttcaaacagctacataaatatgtgttcaaggacttaaaagataaccataatgagtgaagaacagagatataaaaaaaaaaattttaaagaaccaaatggcaattctgaagctgaacagcacaatgcctaaaatgaaagctctgcataaacttaatataaaattagagactacaaatgaaagttaatgaacttaaagacaaatcaaaccagagaacacagagaaaaatatgggcgggtggggaataaacggaggctcagagacttgtggggaaaatacaagcagtcaaatagatatgtaattggagtcccaggaggaaaggaaagaaagaagataggaaaatatgtgaaggactaacaactacatttatataaattttgtggtaagtatgagtttatagagccaagaggtcaataaatcccaaaagacacaaacaccaagagggctacatctagatcacgtcaatgtcaaactgctgaaaatcaaagttaaaggaatgtctgggcatgtgattacacctgtaatcccagcactttgggaagctgaggcaggtggatcacttgagcccagaagtttgagaccaacctgagcaacatgtgaaatctcatctctacaaatatatgtataaattagctaggtgtggtgacacgtgcctgtagtcccagctactttggaggctgaggtgggaggatcgcttgagcctaggagtttgaggctgcagtgagccatgaatgtgacactgcactccagcctgggcattggagtgagaccctatctcaaaaaataaaaataaaaaacaatcttaaaagcagccaattaataaaggctcatagcttacagaagaacagtgatattaatgacagctgacttatcagattggaatttagatctataagaaggaatgaacaaccgtagagtggtaaatatgtgggtaaatataaaagaatacttttcctctgttaattttttagtaaaacaactgtctaatcaaaattagtaacacagtgtcatgggatttattaattattactaaaaatatgacatttttagtcataaatgtacaaaggatgattcagtaaatgaaccaaagcacaaaggatggttcagtaaatgaatttttctattgtaagggtcttatgctttacgtgaggtggtacaatattaactcaaaatagaccacgatgagttaagaatacacatcataattcctagagcaaccacctaaaaaaaaaagttacaaagaggtagagctctttgtaataaaatatataaaaagatggattacaatgaaaccaaagtacaataatgcaaaagtattcagaaaaggaagaacagataaatgcaaatcagatggaataactagaaaataaattgtgatatggtagacttgtagacagtcaatcactaaattaaatacaatggactaaactctccagtcaaaaagcacagattgccagataggattcagaaagctatatccaactatatgctgtctacaagagacattttaaatgaaaataaataggttaaatgtaaaaggatggaaaaaaagacaataagcaaacaaaaaagctagtttgactatattaatgtcagacagacttcagaacacagaatataaacacagataaagaaggacttttatagcaataatgatttcatagtgaaaaagataatttatcaggaaaacataacaactcaaaatatgttacaaacaaatgtaacaataatatatatagttatatattattatatatagatatataacaatatatattgttatatatgttgatatatatatcaacataaatatcaacatgatatatatatcaacatacatatcaacatgatatatatatcaacatgtataacaataaataacaaaccttcaaaatacatgaagcaagaccaaacaaaactaaggggaaaatagactaatccacaattattactggagattttaacacttgtctcttggtaatcgctagaacaattagagaataataataaatatatagaatatttgaagaacattatcaatgaatgtgacctaattgacgtttttagaacactgtacccaacaattgcaaagtgcatgttgtttttaagtgcacctcgaaggtttaccaagaaaaatcatattttgggtcaaattgaaatctcaataaatttcaaaacattgaaattttaaagatttaaacaattaaatctttaaacaattaaatttaaagatttaaacaattaaaatttcaccacaatcaaaaagctgcaaatatgtataaattcacaacatgcttcgaaataatgcatggattaaagaagttacaaaaaaaaaccttgcaaaatatttaaactaaatgataatgtgttcttacacagcatatgaaagtttgtgggatgctgctacagcagtaattagagaaaatgtatagcctttaatgagttatgttagaaaagaagaaagttttaaaatcaacaattaacgtttccatcttaagctggaaaaagcaaattaagtttaacccaatgtaagtacaaggaagacagtaataaagatgtctaataatgtctggtaataatgaagtcaaaagatagacaaatatttgagaaaattagcaaaaccacaagtgtctttgaaaaaaattaacaaagttgatgaatcccaagaaaaactaagaaaaaagacacagtaaatacaaattttcaatatcagagatgaaaaggaggacatcactacagattccacgcacactgaaaagataacaaggcaagattatgaacaacttaattctcgtatatttgacagtgtatatgaaatgaacagatttattgaggattttgattcatcaaaagggatattagaagaaatagaaaatctgtaaaagtcttaattccattaaagaagttgaatttgtaatcaaaagcaaacttgaggactaatggtttcactggtgaattctattggatattgaagaaaagaacaatcccagtcttacataaactctctcagaaaatagaggatgagagaacattccttcacaagttttgtaaggataggagaatactgattccaaaccttacaaagaaattacaagaaaggaaaattaccagccaatattctttataaacacagccacaaaaattgtcacaaaatattagaaataaaattctgtaatataaaaagagaataatacatcatgaccaattagagcttttcacagaatttcaggttttttcaacagtcatatataaatcagtgtaatgcacaatattaacagaaaaagggaaagaaaaaataatctgactaaatacaaaaaaaagaactatcaagaatcaatatccctttgtagaagaaataaattttaactagaaaaacaaaggaacttcatcaatctgataaaggacttctgataaatctacaaccaacattatgcttaagggtaaaatactaaatatgttcccctaaacattggaaacaagacaaagaaattctctcctaccatgtctattcaacattgtcctggagatactagccagtgcattaagaaagaaaaaagccaagatcaaaaaagaagtaaaactgtattcatttacagatagtatagtggtttatacagaagaccctaaggaatctacagaaaaattgctagaacatcagtaaacttagcaaggttgcaaggtaactcagtatacaaaaataaatagtatttctatatactggcatcagcaaacaattggaaatgaagtttaaataatttcagttatattttacatttttgcattaaaaatataaaatgcttaaaaatacatgaacaaagtaagtacaagatctttgaaaacattaacaagagaaattaaagaagtaaaggtcaatggaaaggtgtaccatgtttatgaattggaagactcaatattggttgacttctagtactggaggactcagtacaaaaggctcaacaacaatatataacttcaatgcaatcccaatcaaaatccacagactaaattcattactgaaatgaaaagaatctgtaatagccaacgttgaaataattgaaaaataagaacaatgttggaagactaatactatctaattactaaactagagtaatgaagacaataaggtattagcattagaatagatgaataaatcaatggaacagaatagacccataggtactgattttcatcaatgacaccaaggtcattcaatgagcaaaataaagcatttcaacaaatagtgctgaaagaactgaataaatatatggggtaaagtgaacctcaacccctacttcacactatacacaaaaaaatcaaattgaaacagactataagcataaatataaaagctaatactgccaggtgctgtggctcacacctgtaattccagcactttgggaggctggggcagaagaatcacttgagcccaaaagttcaagaccagccacagcaagaccctgtttctacaaaaaaaaattaaaatattagctgagcatagtggcgtatacctgtagtctcagcacactgggaggctgagatgggtggatcacttgagcccaagagttcaaggctgcaatgagctatgattgcaccactgcactccagcctgggcaacagtgtaagagaccctgtctcaaaaaagtatagttttataaatactataatatttacaatattatagtaatactgtaataatataatcggagaataattccatgacctctggtagacaaacatctcttagagaaaatacaaaaggcactcactttacaagaaaaaatgattaacaaattgaacctcgtgaaagttaagaatttctactcatcaaaaattgctgttaagaaaatgggaagacaagccacagactggggaaaaatattcacaatttgtgtatctgacaaagcacttgtatccaaaatacataaagaacttaaataaatcaaaaataaaagatttgagcagacttttccagaaaagatgtttaaatggccaaaaagcacatgaaaggtgctcaacatcattaatcctctaagaaatacaaattaaaattacaatgagatagtacttcacaaccactaggatggctaaaattaaaaagactgagaataccaaatgttggccagaatgtgaaacaactggaactctcatacattgctaatggggattaaaatggaacaaccaattaggaaaactagcagtttcctggaaatttaaacatacacttactctatgacccagcaattccactttcagatattctcccaagagaagtgaaaatgtatgttcacacaaaacttgtccacaaatgttcatagcagcttttgtcgtaacagccatacagctggatacaaccccaaatgttcatcaacagaagaatggataaacaaactgtggtgtattcatgcaatggaatactactcagttgatatgtacaataacatggatgaacctcagaaaccgtatgctgaatgaaacctgccaggcacaaaagggtacacgttatgtgattttatttatttgaagttcaagacagatcaaagcaatctatcatgatagaaatcagatccactatgggtggtgggaatttgctggaatggggcacaagggaactttctggggtgagggaaatttccatatctttttttatgtattcaagggatacatatgcaggtctattaccagggtgtattgtgtaatgttgggcttctattgaacccatcacaaaaattaactcaagttggattaaaaacttaaatgtaagacctcaaactataaaaatcctagaagaaaatctagaaaaaaactcttctggacattggcctaagtaaagaatttatgactaagccctcaaaagcaaatgcaacagaaccaaaaattgacagttggtcctccattaaactaaagagcgtctgcacagcaaaagaaataatcaacagaggccgggtgcagtggctcacgcctgtaatcccagcactttggcaggctgaggcgggtggatcacgaggtcaggagatcgagaccatcctggctaacacggtgaaaccccgtctctactacaaaatacaaaaaattagccgggagtagtggcgggcgcctgtagtcccagctacttgggaggctgaggcaggagaatggcatgaacctgggaggcggagcttgcagtgaaccgagatcgtgccactgcactccagcctgggggacagagcaagactccatctcaaaaaaaaaaaaagaaataatcaacagagtaaacagacaacctacagaatgggagaaaatatttgcaatctatgcatccaacaagggtcgaatatctagaatctataaggaacttaaacaactcagcaagaaaaaacaaatagccccatatcttgattgtggccttggttccagctgtatggttttgtcaccacttgtggaattgtacaattaaagtatgtgtatttcactgtacacagactttaacttcaatttaaaaaatgtaaatacacattccacttgtactgaatcttgctaatgcaagactccagcgccttactaagtctcaacggtgttttctgaagttcccggagtagactatgtgtgctcatgaacaagtccttcaggcttccgtgcagcccctgctgtcattgtggcttctgcaggctcctggggcttcccaagcatccctgactttcctggcctggctgctgcctcccttccactgcagtctcccctgtctgttagatctggctcctcacaccaaaaaagctgtggttatttatctgtgatgacaagcccctagcaggtcactcataactctcagtagaagactcccaagcagtgttactgtgagagttctgccaccatagtcatcatgtttctctgttgttggccccaatgtttgatcgattttgctgttattaatattgtttttctggaaaactgctctttcagctttttcttttttttttttattattatactttaagttttagggtacatgtgcacaatgtgcaggttagttacatatgtatacatgtgccacgctggtgcgctgcacccactaactcatcatctagcattaggtgtatctcccaatgctatccctcccccctcccccctccccacaacaggccccagagtgtgatgttccccttcctgtgtccatgtgttctcattgttcaattcccacctatgagtgagaatatgcggtgtttggttttttgttcttgcaatagtttattgagaatgatgatttccaatttcatccatgtccctacaaaggacatgaactcatcattttttatggctgcatagtattccatggtgtatatgtgccacattttcttaatccagtctatcattgttggacatttgggttggttctaagtctttgctattgtgaataatgccgcaataaacatacgtgtgcatgtgtctttatagcagcatgatttatagtcctttgggtatatacccagtaatgggatggctgggtcaaatggtatttctagttctagatccctgaggaatcgccacactgacttccacaatggttgaactagtttacagtcccaccaacagtgtaaaagtgttcctatttctccacatcctctccagcatctttcagctttttcttagacccatctttcttcccaagacgtgtggcggctggaccaggaccagtgatgagcaggagacaatctactgtccttaagaccacatctcactccagggctcacagcctttcaaggtcttcctttgcaatgacatccctgccccaccccacctcttgagaagacagaccatcctggaccctctccttctcccatatttcgatgtggatacccaaggagagctgatgtgctctttttcttaattttttttttatttcagtagctttaagggtgcaagtggttttttgttacatgggtgaatttgatagtgatggagtcggggatagtggtgaagtctgcacccatcatctgaattgcacattttgtacccaataggtagtttttcacccccaaaccccctcccaccctctccccttttgagtctccagtgttcaccatatcactctgtctgcccttgtgtacccatagcttagctcccactgacaaatgagaacatgcagtatttggtaactcctgagttacttcccttaggataatggccccccagttccattcaaattgctacagaaggctttatttcattcttttttaaggctgagtagcataacacggtgtatatataccacattttctttatcctgtgattggttgacggatgcttcagttgattccgtatctttgcaattgtgaatagtgccgcaataaacatacacgtgcaggggtctttttgatataatgacttattttcctttgggtagatacccagtggtgggattgctggattgaatggtagatctgctcttagttctttgagaaatcaccataagctctctcacagaggtgacactaatttacgttcccaccaggagcgtataagtgttcacttttcaccacatctgcctgttgctgttgcccgtcccactagacctctatgagctcctcttatctcacctgagaaaatcttatactccttcctattattccccagtttttagtaaagttcgttaaacacaagtttatgctagcagggctttggggaaatgagaggaagcctgtccactttgccccatgtgtaaactccagacctctccccatttctcaaagccttccaagcatgaactgagtgtttcacaaactttacgaaagactggggataataggagggaacatacagcagaagaggaaaaatttaacattggacaccagatctcttgattccatcagccaaaatcttttctccagggatccctgattccctggaagatgacacactgcaggggtcctctgtaatcctctttctcccctctacccaagttttgtcagggggattcaaaagcaaacaaaacaaacaaaccaaagatctctgttaatattgcgtgatctcagtgagaggaggccctgtctgaagtctgtgcatctcagttacccaccgtgctttgacccccagtgcttcagggcccctcactgctctctacctcaaagttgcagacacaagctgctgggagttctcaatggacacatagagtctcttcccacttctccaacccctcagcttcaggcatcactgggttgaataaaccttggtcctctcgactccttcccactacctctctgccccgggctgcactaggctcccaagtcagacagccggggctgcagcccctatcccttgcaatgagtcttctccagggagggccctcattttggggtatcaagagtgtccacagcgtggatgcagtgaacaggtaacacttatacactgctggtgggaatgtaaactagtacaaccactattgaaaacagtgtggagattccttaaagaactaaaaatagaactaccatttgatccagcaatcccactactgggtatctacccagaggaaaagaagtctttatatgaaaaagatacttgcacatgcatatttatggtggcacaattcacagttgcaaaaatgtggaaccagcccaaatgcccatcaatcaacaagtggacaaagaaactgtgagatatagatatatatagatatagatatagatatatataatggaatactacacagccataaaaatgaatgaattatggcatttgcagcaacctggatgagattggagactattattctaagtgaagtcactcaggaatggaaaaccaaacatcgtatgttctcactcataagtgggagggagctaagctatgaggacaggacacaaaggtataagaatgacacagtggactttggggactcagggggaaagggtgggaagggcgtgatggataaaagactacaaattgagtgcagtgtatactgctcaagcgatgggtgcatcaaaatctcacacatctccactaaagaacttactcatgtaaccaaacaccacctgttccccaataaacaatagaaaattttttttttaaattttaaagagtgcccacaggacacacacatcttatgcttagccttgaacatccaatgcccctatttcaataactaccctgttgatgtttgcattgctatggctgtgtccattttacctcacaatcaattttagatgattgcagaaccaaagcaaatgatttgcagtagggtttggggtttaaaggtttggtttaaaggtttggtttggtttggatagagctatgctctatcgttgggttttcaatgagtagctaggtgacctcaggcaagctacagcagattaccttgaagttacttcagcaagttaccccactatgcctcatttttcccatctgtaaaataaggataataacaggatcatggggtggggtgaggattaaatgagttaatatgtgggaagggtatataatcgaacagtgtctgcaacagagtaagtgctatttaaacgtttgttacataaattatgaacattatataaattgtcttcatggacttcaaaagcaggacatgacatacggtgggaaattagttgaagaaaccaaaacttgtatacgttcttttagatacgccacttgtgtgaatatttttaattcagctaaggggtaaattatatagatgtgcccacaaggttgcttttagcttagtcaacaagagcagaagcttcaagatggcaaataaaacaacatccaagacaacgttgaaagaaaggtgaatgatataattggggtcaagccgtcttcaattgagggcactctcttggctccacttcccctcactgtaagaaatacagctggagggataaatacaaggacacaggccccaaagatgtctgagtggccagagaagagagacccccaaggctggcttgcaggctgcggggctgggggcggaggcgggggaaggaccttcctcggtgtcctcttatgaggcagaggggaccagactatccatcacagcatcataatgcttaagtggcatgaagtcgtaaagcccacaacgaagcagggatgctccactgccagcggaatctctctctctctctctctctctctctctctctctctctctctctctctctctcttttcccttcccccagtccctccccaacccaacagtggaggcaggaggccctgagcagccagccctccagctcagtcactggtcagagggatctcctgaggatgggctctctgccctgcccaacaaggctacaaagtccgggagaaagcaacgtcattcgttcattcatccactcattcattaattatgtactgagtgcctatcacgtgtcagaccctgccccaggcattggaaacatcagagactcaaaccaaaatgcagtacaggccagctgtggtggctcacgcctgtaatctcaacactttgagagactaaggtgggaggatcgcttgagctcagaagttcgagaccagccttggcaacatagtgagacctcatctctacaaaatatcaaaaaattagccaggtgtggtggtgcatacctgtggtcccagcaactcaggagtccgaggcaggaggatcgcttaagcccaggaggtcgaggctatggtaagctgtgttcacaccactgccctccagcctgggcaacagagtgaaaccctgtctcaaaaaaaaaaaaaaaaaactgtagtacaaccgcatagtgaaatattatccagcctgaacagaaaggaaattctgaaacatgctacgatgtggataaacttcaaggacattatactaagtgaagtaagccaggcacaagaagacaaatattctgtgattccacttatatgaggtccctacagtagtcagttctatagacagaaattggaatggtggttaccaggagctgaaggcggggtgaacaaaaagttactgtttaatgcaatggtccccaccccaacttttgtggcaccagggaccagtttcatgaaagacaatttttccactgatggggcagagtgtgtgaggggggagatgtttcaggacgaaattcttccacctcaaatcatcagacattagttaaattctcataaggagcacacaacctagatccctcgcatgcacagttcacaacagggttcacgctcctataagaatctaatgccactgctgatttgacaggaggcagagctcaggcgataatgctcgctcgcctgcctctcatctcctgctatgcggcccatttcctaacaggccacggactgataccgatctgccacccaggggttggggaccccggtttaatggtacagagtttcagttttgcaagatgaaaatagttttggagatgatggtggtaatagttgcacattgcataacaatgtgaatatacctaagaccactgcactatacacttaaatattgtcaggatgataaatttagcgttatgtgtatttgacaaccttttaaagcaaaacaacaataattatgatgaaagaaggtggagcttgagtaagcacttgaaggaggtggtgcgattagccaagcagtcccctggggtaacagcagaccaggcagacggaagcaaaagggaagaaggcactgaagtgggaccatgtgcttgatgtggtgaagccactgcatccccccagacttcatgccacgctggtgacattttatgcagagcacagagagttaggagagagaacagcactttgtgctccacaaaggaagaaggtccttgagctataagccccagaggctcagtggactatgttgatttcatcagctttggtgataaataagctttgtcattccccagtctgctaataattgggtctcagacaaatcagtgatcaaactttaaaagacagtctgtgaaccactaaatcccacagaagaacaattgcacaaaagtttactgtagccatatgaagggaatttttatgaaccttttaaatctgctgatatacttgggaagcaagcgcatcggtggtgcgtttaaaagtctatgtggaagtaaacattttacggcatgtttgggaggaagggaaaagttagccaagattcatatttttctagggcaaatgaggtcatgcactgggttgtggctgatcttccctcccatgggatcctgtaaagattcgtgaaggccccagacactgctgttttgctactcccggagatttgtgggatttgggttaaacgcaatagtaagcattcttcctcaagacagtccaggaggcaacagccagaagatggcgccgtagctacggaaacgaagacaacagtgtccatgcgtgccctcccacagcctgaggacttgggacccaggaactgaggcagatgcatccagaacgaggctggaccttaatgcccaactggggtctaagcagcggtccccaagcttggttggcacagtggctcacacatgcaatcccagcactttgggaggctgaggtgggaggatcgctggagcccaggagttcaagacctgactgggcaagacccgggtctaagcagaaggcaaaaagagaccccttcttccttctcctgatccacagccctgcctggagctttcagcagaagcgtaataggataccagagttgctctgtgtttctgtgtggtctcagcgggaaggcagtccttgttcaagtggacattcgccatttagactgttaaaattgcttcttcctctcagatcctggttttctttaaggcacttgtgtccccttgtccgggcttgacccatcaggatccttaacccaggccctggagggagccctctcattgcagtcctggtgtctggacttgcggctaccacaccacatgatgtctcaagccaccctgcttcctctgtttttcccaagctttgttctcttgcctctcttgagttgtctggtaaccttccagtaaattgccaacgtgctggtactcactggaatttgttgcagttgcctgtcagcgaagaatcttgatgggtaaagatgggtatagctccaggatgtgctactaagacaagcatcagaagtacttgcaccacacatctccaggcaaacactctgcctccagaggtccgtgatggttaatactgtcaactggattggattgaaggatgcaaactattgttcctgggtgtatatgtaagggtgttgccagaggaaattaacatttgagtcagtggactgggagagggagaccaccctcaatctgagtgggcaccatctaatcaactgccagcgtggctaggataaaagcaggcagagagacgtggaaggactagactggctgagtcttccagcctccatctttcccctgtgctggatgcttccttcccttgaatatcagactccaagttcttcagcttttagacccttgaactcacaccagtggtttgccaggggctttcgggggccttcagccacagactgttggcttccctacttttgaggtttgggactcaggctagcttccttgctcctcagcttgcagacagcctattgtgggacttcaccttgtgatcaagtaagtcaattctcctaataaactctcctttatatattcatctatcctgttagtcctgtcccttgagagaaccctgactaatacaaggtcctactgaaaaatggcctactgaatggcctactgaaaaatggtcaaataaagccatgaggaactatgatttcattatttcaaaagacagaaataatccttgggattctaagccttcacagagacagaggatagaccctatgctcttgctaggaccctttcccaagcaggattctcaggttagaagtgtcaggagccatcaaaaccaaaaggctactgtgcagaatcctagatttacttttattttattttatttttattttattttaattgtagtaaaacatacatgacatacaacttaccgttttaactattttttaagtctaaaaaatggcattaagtacattcatattgtgtgcaaccatgaccaccatgcatctccagggttcctttcatcttccgcagttgaaactctgcacccactaaacgctagttcctcattcctcttccccatctccaggcctgggcaaccactattctactttctgtctctatgtatttgactactccagatacctcatataagtggaatcatatagtatttgtctttttgtgactggattatttcacttagcagaatgtcctcagggttcactgatgttgtagtatgagtcaaaatttccttccttggctgggcatggtggctcatgcatgcaatcccagcactttgagaggtagaggagggaggatagcttaagcccagaagtttgagaccagcctgggcaagatagggagaccccatctctacaaaaagtaaaaaaatgaggtgggtgtggtggcgcatgcctttggtcttagctactcaataggctgaggcagaaggatctcttgagcctgggaggtcaaggctgcagtgagccatcattgtgtcactacactcagcctgggtcacagaatgagaccctgtccccccgacccaaaaaaaaatcctttctattccaagctgaataataatcccttgtacagatatatcacattttgcttgctcattcgtctgtcaatggacacttgagccacttccaccttttggctattaggaagaatgctgctgtgaacatgggtgtacaaatatctgcttcaggccctgttttcagttcttttggctgaatttactcttgaaggcagctgaatgtgagttgcacagccttgccattttacaggcaatctacttgaataatgtctatctgagcacttctcatgtgcagggcactatgacaggctcaagggacaacaagatggatctacatgggcatgggtccttccccaggccccaccacgaagagaagagtctccggcacagaaacgtcaggaatgatgcttacccagctcccacaggatcccagacaggagtgcaagtagctcctctaggagctctgagaacagaggggctggcatgagctggcggggcactggggatgggccatgaagggtgtcaggacatggagcagcaggaaccacccttctcgtggtaagagcctgattgtcccattagacaagctccaagataggcctttcaaaggctctcacctggagtgcccaaggaggcttctgccttgcaccctcatgggcaaggactttacatgtggtcttgaaggctggcagcaaacctcccagtggatgtgatcttgggtaagttacctatctcacgttaagttgactgagcctctatcacctcatctgaaagctcatagagcgattgtgagaactcagtgaaatcatgcgtgttaatattttagctcagtgactggccttaggaatgccctgacacagcattgactatttctctctaacctactagctccatctgagcgagaattctgttttgctcatcactgtatccctgggaactagcatagtgcccaacacttagtaggtacatagtaactattatcaaattttctaatcttcacatttaagccaccaaaaaaaggtaggcataggtgaatttacaaaacaaagtgtgttatctctcagcaaaaaatcaccctgctatgcacacttctctagcactggggctagatgcctgaaaactgcattttccatattcttttgctagctgactgactttgggctaggtttcactaatacaaagcgctggggataaaaatgaaaggcatgagaaaaggtgaaactattttccagacgcttctgtggcagaagtagcagtagcagcagtggaggagggtcagcagggaaggggacagtagccaaggcaggaacagttgtgatggcagcagcaggccagaaaatgcaggctcaggttcctgctcaggcagctcatccttaacagccatggtctcaggggcatccagccatgggattgcagcttccatagctgttactcattgggtaaattcactgcaccttttttccctcctgtcacttttctgacacctttgtaaccaactccttagattaaatgccctgttttgaaagacctggggggtgtctgactgatgggatttgaactgatacagttaactcattcttggagcaagtgtctaggggagtcagggcagcccttctcccacggccattctagcgatggtcccaccttttcatctctgcacaggagaggctgttatgaagaagcctcacagtcttccaggccccacctgagacatgccaattcacatggttaggctggttgttcattgcacagaagtgccctgctaagggtacatgcgtagctgagacctgttctccaagcctgtgcccagactgtggcactcaccttgtgggtgagggaggcctttctctaagatatacataggtagatgataaccctgctgagacaggtggggccagctcttttccaaaaagctcaaagcccctagcgccctcccaaacacccgcagggtcgctttctgggctgactcggacatttcagaggaaaagcatttcggtcaggattaaagaataattccacttaggcagaggccaggccagacttaagcaaattccagacacagcagagcttctgatgcggcctcaaacctggctctccattgctcaaaacatctccaggcctccctcctattgtgtatgagtttccactgggaaattgacctatttctgccctcacaaagctcctcagcagttggacctgcagcagccagaaatctgtctccatgtctcctcttactaaatgaagaacccagaagactgtaccaagccccccctccacctcaaatcactagctccccaggctgggccttggtagcacccactgttttccaggcatctgtgtccacactacatttttgaagggcttcaggtgcctctgataaaatgctatcaaatgaaaaaagccacccatctttgggctccctaacccttgcagaactcaacatttcttttcctgttgatggggagaagcaacaccacccactgagttcactgaaaccgaggcttccatattcccgcaggagagtgctcgtatgcttaaaaccctcgccatatgtgtcgatttaaatggaaaccaaacggggaaggattctgacgacagtctgtcactgactggagcgctacttcctccagttaatttatgtcttccgtaatcacattgaggctttttaaaaggctctacctgtgacggcattttttttcccccatacgttcacattcaaaggtccctggcccatgcgctaatcgtcattttaagacacctcacgctccgagcactttatcttcccagctctttacctgtattaattaattagtgctataaatacaaccagcacatgactactctggagctaatcagtcactgacacggctcaggacctggaggaaaattaggaaaattgaatctttccaaaagttgggcctatgcgaggtaacttagtcaatcgtgtcctgagggtcagtggggaccaactgatttaggctccgcctgggtagaaaagcaatttcctgaacagcaagtcagcaacgctagttaaagtgattctgacctgttataagtaaagcatgaattctgttttcctgctggttgggtgcacgaccacttactgagggcctggtgctggcacagccctcatcctcggctgtacaaggaatgtcagaagacagtgtcaggcctttcccactacctttttatggtggagttaaagagagccaccatgcattctagggtttgaaacatcaatcccaaaaaccaagcaagggaaatcaggggacttggggttgacataaagtattagagattctctgagtcattcaaaaaaatattgaacatctacgatgtgttgcatggccaagacgctaagatacttgatgtctattctttcttttacttatttatttgagatagggtctcactctataaccgaggctggagtgcagtgatgcaatcatggctcactgcagcctcgacctccggggctcaggtgatcctcccacctcagcctcctgggtagctgggactacaggtgcacgccaccatgcctggctaattttagttttttgtttttttgtttttttgttttttttcgtagagatggagtttttgccatgtttttcaggctggtctcgaactcctggactcaagtgatctcctaccttggcctcccaaagtgctgggattaccagcctgagccacgttgcccagccttgatacatatttttaaagggcttacagccactgaggaagacagatttgcaaaccacaagaaacatacccaagaatccacaatgctcagaattcaaggtgtagaatatccaacaaaaggatattcttttttttttaatattttatttccttaggttattggggaacagatggtgtttggttacatgagtaagttgtttagtggtgatttgtgagatttgggtgcacccatctcccaagcagtacacactgcacccaatttgtagtcttttatccctcatccgcttcccaccctttccccttgagtctccagagtccactgtgtcattcttatgcttttgcatcctcatagcttagctcccgcttatgagtgaaaacatacgatgtttggttttccattcctgagttacttcacttagaacaaaaggatattctaaactgcccaatttatctggtcattggcctgcctagaaaggaggctggaagaaaagaactcttgattcgatcataggcctcgaggactcttcttagtgctatccagcactgtttatgtttagcttgcaccttcactctgagtttctgggtccaaattccgggtttggccctggggagttctcctccacactaagctttggcctggcctacagacctcttgtcctggggctggcctccttgtgggtcacaggcaaacagggctaaatgggagtgagatctagtgagactgaatccctgaggctgatctaggaacctcatttctctagctcagtttcttaatttcttgttaactgcaaaataaagagctcatctcacgcagagttttcacatgaaacaggagctgcaggctgttgtttatatctgtgagtagatcacagatctactgcatctcaaaaaataaataaataaataaaaatcaacaacagtgttaagtttagtttaaaagaagccttgaatgtacagggtgggagagctggattctgcctgattagggtggagagtggagggggtgggcaggaggtcaagaggaattttggaagaggtccatttccaacaggcagggttaagcagtgctaggggagggaacactgcagggtacaggaaccaatgtgggcaaggacaggaatgggcagggcatgctgaggagtgatgagtgggagcccactttcaacacccatcccgaaaaggctctcggacttccgcactttatagatttcatttcctccttcagtgtcccaatccctcattcctcacccagtcaagtgtcttacaacagcagtgaaagcagcgacaggtttccctgggagccagcctgcagggaaatgatctctttatgtctcctgtggcttcctgcccttctgcactctcatggtccagctctattctgaggcagtccctctgggtggctatgaataggtgtgttttattcttgcatccttggtgcgacaagccaccctccgatagtttgcttctgctcctcatgaaagagtccaaaatgtccaaagacaagggttccacccatccacatagaaggaaaagtcctacgactggacaaaggcattctgagcaggtacaggttgaagactgtgaaattgaccaaggaaggtgccaatttgaattttcttaaagtttttcactccactgtaacaatgtattctcaggcgagagggggctctagacaccaagtggagcttgtgagagacacccattgaggctgttcaggaaacagacaccacagcctgcctgtggatgcttcctcaaatttcaccttcttggaaaagacaccattctgttggtgcacagccaaggccgcctctgctttctggaaggtgactctctcttttagggatctttaggaatcccagcaactgccctgtgctgtgcacaaacctcaacatccaccaacacacagaaatcctgctacctcctggccacttttctattccacatcccatagcaaaaaaatttattgaagtaggattgacaaacagaaattgtatatatttaaggtatacaacataatgattcatatatatatttatatttatatatatatatacatatagtgaaaatatttccacaatcaagctaattaacaaatccatcacttcccatagttacccttttgtgtggggggttgggggggtgagaacatttaatatctactctcttagcaaatttcaagtgtgtgatacattattattaactagtcaccatggtgactatggattagtctatggttagtcaccattctgtactatggtgactatggatagtcaccatgctgtacgttagatccccaggacttatccatcctatataactaaaattttataccttttgaccaatatctcccccttgctcccacccctctagcccctggtaagcaccattctactctctgtttctatgtgtttaacttggttagattccacatataagtgaggtcacgcggtatttgactttctctgcctagcttattcacttagcataatgtcctccacattcatccatgttgtgataaatggcaggctctccttttttaaggctgaataatattccattgtacgtaagtatgtctgtgtacgtgttgtatgtgtatgtgtgtatacacatgtgtatgtatatacacatacaacagacatacatatacacattgacatacaagacacacacagcagtttctttatccatttaactattgtcttagtcttttttctcttgctataacaaaataccacagactgggtaatttacaataaacaaaaatttattggcttacagtttgggaggctgcaaagtccagtatcaaggtgctggcatcttgcaaggaccttcttgatacatcatcccatggtggaagagcaaaaaggcaagaatgggtgagagaggcaaaagaaagcccaactcatacttttataaggaacctgctttcgcaatgataaatctactcccaagatggcagcattaatccattaatccaatagaatcctcatggcctaataacctctcattaggccccacctctcaacactgttgcattggggattaagtttccaacacatgcttttccaacacattcaaaccataccaactgtcagtggacacttccagatcttggcttttatggataaagttatttccagatcttgacttttatggataaagctgcaattaagtgggagtgcagatatctctattaggtcataattttcttttctgtttttttagatggagcttcactctgtcatccaggttgtagtgcagtggcacaatcttggctggctgcaaactccacctcctgggttcaagccattcttctgcctcagcctcccgagtagctgggattacaggtgcccaccaccacacctggctaatttttgtatttttagtagagtcagggtttcaccatgttggccaggctgatctcaaactcctgacctcaagtgatctgcctgcctcagcctcccaaagtgctgggattacaggcatgagccaccgcacccagccaacgttgtaattttatttctttctgggtcatatagtagttccatttttaattgctttaggaaccttcatactattttccctaatggctacaccaatctactttcccactaacaatatacaagggttcacttttctccacattcttgccaacacctatctctgcctttttgataatagccttcctaacagctatgagataatatcttatcgtgattttgatttgcagttccctgacagtgatgttaagcacctttttatatgcctgttggccattatgtcttctttggacaaatgtctattcaggtcctttgcccattttaaaatcaggttatttgtttttttactattgagttattgagccctttatatattttggatattaaccctttatcagatatatggcttgtaaatattttctcccaatacatatgctaccttttcattttgttaattgtttctttactgtgcagaagcttttcagtttgatatagtcccatttatttaattttcttttatagcctgagcttctggtgtcatatccaaaataatcattgccaagacccatgtgaagaagcttttcccctacattttcttttaagagttttatgatttcaggccaggcgcgctggctcacgcctgtaatcctagcactttgggaggccgaggcaggtggatcacaaggtcaaaagatcaagaccatcctggttaacatggtgaaaccccatctctactaaaaatacaaaaaattcaccgggcgtggtggcacgtgcctgtagtgtagtcccagctactcaggaggctgagacaggagaatcacttgaacccaggaggcagaggttgcagtgagctgagatcatgagatcatgccactgcactccagcctgggcaacagagcaagactccgtctaaaaaaaaaaaaaaaaaacgaattttatgatttcaggtcttatgtttaagtccttaatccattttgagttgatttttgtgtatggcataagaataaggattcattatcattcttttgtatgtgaatattcagtttctccagcaacatttaatgaagtgattgtcctttctcattgtttattcttgttgtttttgtcaaagattagttgatcatatacttgtgagtgaatttctgggctctctattctgttccattgatttatgtttctgtttttatgccagtaccatactgttttgattactatagctttgtaatataagttgaaatcagaaagtttgatgcctgcagctatgttcttctttcttaaaactgctttagctatttgggatcttttgtggttcctacaaatttaagattgttttttatatttctatgaaaaatgccattggaattttgatagggattgcactgaaattttaggtcactttggatatatggacattttaataatattaattcttccaatgcataaaacacaggatatctttccatttatttgtgtcttctttaatttctttcatcaacattttatagttttcagtgtacagatctttcacctccttggatacatttagtcctaagtattttattctttttgatgctgtcataaaaggaattttttttaatttctttttctagtagtttgtttttagtgtatagaaacaattgatttttgtatgttgattttgtattctgcaactttacttaattcatttattctaacagttttttggggatgtctttagggttttctatatataaaatcatgtcatctgcagagaaaatttaacttcttcctttctgatttggatgccttttatttctatttcttgcccaagtgctctagctagaatttccagtactttgttgaatagaagtggatagagtggacatccttgtcttattcctgatattagaggaaatgattcagcttttcactgttgagtttaatgttatctgtgggcttgtcatatatggcctttattatgttgaggtgcattccttctacacctaatttgttgagagtttttatcatgaaattatgttgaattttgtcaaatgcttttttgctcttattgagacgatcatatggtttttatctttaattctgttaatatcatgtatcacatttattggttcgtgtacattgaactatccttgcatcctggggataaattccatttgatcatggtatatgagtttttgtgtgctattgaattcagtttgctagtattttattgaggattttggcatttattttcatcagagatgttggaaagtaattttttcttataatctccttgtctggctcctctattaggtaatgctgggcttctgaaatgagtttggaagtatttccttttcttcaatttttggtagagtttgaaaattgctataaattcttttttttaagtttggtagaattcaccagtaaagccatctgtctatgggcttttctttgctgggagatttttcattacagattcaatttccttgtttttcattgatccattcatattttctattactttataattcagtctcaatatgttctattgtttctctaatcactatttcatttatttctgctctgatctttgttatttcctttcttctgcttacttatgttgggcttagtttgttctttttctagtcccttgagataaagttaagttgtttatttgagatcttcactccttcttaatgttaagtaagtatttatcgataaaaatttccctcttaaactgcttttgctgcatcccataaattttggtatatttcatttccattttgtttatctcaattttttaaaaaaatttcttctttaacccattggttgtcactatgatctgaatatttgcatcccccttgaaaccctaaccaataccaatatggtattgggcggcgggtgggaggcctttggaatgcagagccctcatgattaggattagtgcccttataaaagagacgtcaccaagctagctagccccttcctccatgtgaagttacagtgaaaaaacattagtctatggagaaagcaggccctcaccagacattgaaactttcattgccttgatcttggacttaacctccagaactgtgagaaatatgtttattgttgataagctacctagtttatgctactttactagaaatgcctgagcaacctaagacagttgttcagaagtggtgttcaatttccacatatttgttaatttttccagtattcctcttgttgttaatttctagttttataccactgtagtcagaagagatacttaatatgatttcaatattcttaacatttttcaagacttgttttgtgacctaacatatgatctatcctagagaatattccatgtgtgcttaacaagaatgtgtatttggttgctgttggatacagtgtcctgtatatgtctgttaggtttatttggtctaaggttcagtttaagtccaatgttccttatttattttatatctggatgatctgtctgtttttttaaaatggggtattgaagttccccttctattattgtattgctgtctatttctcccttcagatctgttaatatttgctttatatatttaggtgttccaatgcttaaggcatatatattgtcatattctcttgataaattgatccctttatcattatataatgaccttatttgtctcttgtgacagttttttacttaaagtctatatttttctgatttacctatagccactcctgctttcttttggttaccatttgcctagaatatattttttcatcccttcactttccgtgtgtctcttgtaggcagcatataattaaatctttttttttttttgagacagagtctcagtctgttgccaaggttggagtgcagtggcatgatcttggctcactgcaacctctgccaaccaggttcaagcgattctcctgcctcagcctcccgagtagctgggattacaggtgcctgtaccacagcacctggctaatttttgtagttttagtagcgatggggtttcaccatcttggccaggctggtcttgaactcctgacctcgtgatccaccttcctcggcctcccaaagtgcagggattacaggcatgagccacggtgcctggcaaaattaaatcttttttaaaaaaatccagtcagccactgtatgtcttttgattggagaaattaacccacttacatttacagcaattattgataggtaattacttcctattcccattttgttaattgttttctaactattctgtaattttgtttctttcttcctctcttgacatcttcttttgtgatttgatggtttctataatggcatgctttgatttctttctttttatcttctatgtatctactaaggctttgctttgtggttaccatggggcttacatgaaacatcttataattagataaatctattttaagctgataacaacttaactttgatcacatacaaaaactctacacttttacttctctcctcacattttatgcttttgatgtcacaatttacttatttttatattgtgagtccattaacaaatcattgtagctatagttatttttcatacttttgatttatacaccaccattacagtatacaagtattctgaatttgagtacagatagtccctgacttacaataattcaactaatgatgcttcaactttacagtggtccaaaagcaatacacacttagaaagaaaaataaaacaaaacaaaaaatttcagtatagtattcaagcaattacatgagatattcaacactactataaaataggctttgtgttagattattttgcccaactttaggctaacataagtattctagatatgtttaagctataacattcagtgagttgagtgtattaaatgcattttcaacttataatgttttcaacttttgatggttttatcaggacataaccccatcataagtcaaggagcatttatatatacttacctttaccattaagttttatacttttatacgtttcatgttacaaatgagtgtcctttcatttcagcttgaagaatttcttcagttgttttttttttttttttttagacagagtctcgctctgtcaccaggctggagtgcagtggcatgatctcggctcactgcagcctccacctcccaggttcaagtgatttctcctgcctcagcctcccacgtagctgagactacaggtgtgtgccaccacgcctggctaatttttgtatttttaggagagatggggtttcactatgttggccaggatggtcttgatctcctgatctcgtgatccacccacctcggcttcccaaagtgctgggattataggtgtgagccaccgcacctggccttcttcagtatttcttataaggcaggtctagcagtgatgaactcctccagtttttgtgtgtctgggaaagtttttatctctccctcatttctgaaggatagcttttccaggtaaattgtccttagttggtaggttttttttcttttagcacattgaatacaatatatttgactatatcctactctctcctggtctgcaaagtttttgctgagaaatctgctgataaccttatgggggttcccttgtatgtgacccatctattttctcttgactctttcaaaattctctttgtctttgatttttgacaatttgactacagtgttccccactgaagtcttctttagattgaatctgtttggggacctttgatcaccatgtatgtggctgtccatatctctcccactatttgaaaagttttagccattatttctttaaataagcttttgcccctttctctctctcttttccttgtaagatttccatagtgtggaaattttatttctcttggtgatgtctcattaattctgtaagttttcttcattccttttcattcttttttctcctctgactggataatttcaaatgacctgccttcaaattcacatattctttcttctgcttgatcaagcctgctgttgaagctctctattgcatttttgcattccattcattgttttcttcagccccataatttctgtttggtacttttgtgatttctttctctttgttgaatttgttcggttcatgtattattcttctgatttcattgagttgtctatctgtattctcttataggtaggtgagctttcttaagacaattattttgaattatttgtcaggcactttttatagatcttcatttctttggggtcagttactggaaaattactgtgttcctttggtggtgttatatttccctggttgtttgtttgtttgttttttatgttcctttaagtcttgcattgatgtctttccgcttgaagaagcagtcacccctctgacttgctttgggagacaaatgccttcaccagtaaacctgattagaaattccaagccctctcagacatttttaatgaaagcatccattccacccttcttgtttcctcttaggttggatggaattcttaagattgtatgccttctttcaattttaaagccatgctgggtgttgagaacctccctcatttcccatatgacagtgttttgaaatgcttaaatttgtgtgccttctcccaatttcccagagtcaagctggctgactatacatgcttgttagccaactgcaaaggctaacactcactttccaggggtacacacagggagccagccatgggtggagagataggtgaggtgtttggagcattgaggtgtccatgggtcaactggaggatctgcaggtgaggcatcccaaacagcttgtgggcaggcttcctgatggattctgcaaagcagttagtaggattgtggccctttgttgagtcccatgtcctagttactgtgagtctccacctctttttcctactcccagcttctcccagctactcaccatacttatgtcctcagtattctagacaagtatgacaggcaagaaaaagatgagcctcttggacagcattccacgcagctgtggaacctgggcactcactcattgctctcattttttcctgtgggaggaattgcaggtgagggaatctcttctgtcattgagctgtgaccccatggtggagggaagatgctggtaaagtaaagatgttcttaccctcttgaatgcatctgttctcagattttatgattcaactgtgtgctggaacttctcccactggactctcagattcccacagaggtactcttatctttgggtgactgtcaaaatcagtgccctatagataaatgatgatagaaaattcctattccaccatcttgctgacatcattgtcttccatttgttttctgttctgaagtttcctatgctctctagggctgcttctcaaggccacctgcccacatcattggtgccttctctcaactgcccatggtttctgcaagattgcccatgaaactgtgttgtagtccagctcttatgctctcagaacaagaaacctagaataataaaaataccagatttaagcccagaatccacttcagcagcactcagatcttccaaatgaagaaagctaattatctgcacccactcttccttaaaacagcaacattcaaaaagaagtgagcagctcctctccaaagatgtgtaagcagaggcacaggaactatctgttctcagccaaagatattctagccttgtgctactaccaatgtggtccatggaccagctgcataagcatcacctgggatgcatcagaaatgcagaatcttgttagaaatgctccctccactccagatctactgaattagagtctgcactttatcaagatccccagatgatgcatgtacatattaagggttgagaagtgttagttcccagccacagcagcacattagaataaccttggcaactttagtttttaaacgtcaacacccaggccccatccacaaccaagtaaatcagactctctgtgagtggggcccagacatctgaattttaaatgttcccaatgggattctaatgtggcctgagtgagaacttcccatgaagattccttcacttcatacccagctagacttgagaaattttccttctcttctttgttgctttttcataggtaatatgtgcacataacttttttaaagtcaaagaatataggccgggcatggtggctcatgcctgcaatcccagcactttgggaggccgagtcgcgcaaatcacttgaggtcaagagtttgagactagcctagccaaaatggtgaaaccccgtgtctactgaaaataaaataaaataaaataaattagccaggtatggtggtgcacgcctatagtaccagctacttggaaggctgaaatgggaggatcacttgaacccgggaggcagaggttgcagtgagccaagatctcaccactgcactccagcctgggtgacagagaagactctgtctcaaaataaataaacaaataaataagtaaataaataaaagtcaatataaactagtgtacagtgaaaagaaagtctctctccatctctaaattttagtgccccaatttcctctccaaaatcaaccactgttaccagtttttgtgtctgtgtgtgtgtgtgcccttccagagcttttctgctttgcttttttcttttctttttttttttttttttttttttgagacagagccttgctctgttgcccaggctggagtgcagtggcgttatctcagctcactgcaacctccacctcccaggttcaagctattcttctgcctcagcctcctgagtagctaggactacaggcaagtgccaccatgctcagctaatttatatatatatatatatatatatatatatatatatatatatatatatatataatttttttttgtatttttagtagagacggggtttcaccatattgcccaggctggtctcaaactcctgaccttgtgatcctcccacctctgtctcccaaagtgctgggattacaggcgtgagcccccgcgcctggccctcccagagcttttctatgaatgatcaaacacaatcaagtacagacacccttcttctttatatatagtagtattatactatatatgctgttctgtatcttgctattttcactcaacactctatcttagacattgtcccacagcagtaattgtgtctcaattctttttgacagatacatactattctattgtatcaatgtagcatcatttattaatcaatctccaattaatgtacattcaggatatttccaattttttcttactacaaataatctgcaatgaataatacataaaacagtacacacttaagtcactctttccctcttttcctactttttttcaaagcactcgtcaacaccacctcagggtagccacatcatttatcatacagactggaacacttcttttttttttttttttgagatggagtcttgctctgtctcccaggctggagtgcagtggcatgacctcggctcaccacatcctccacctcccagattcaagcaattctcctgcctcagcttccctacacctgtagctgggactacaggtgtccacgaccatgcccagctaatttttgtatttttagtagagacagggtttaactatgttagccaggctggtcttgaactcctgacctcaagtgatctgaccacctcaacctccccgagtgctgagattacaggcgtgagccaccgtgcctggcccagactggaacacttctgagagcagaaaggggcactaacagttctactagaacatacctatgactatgccaggcaactgggatacatgggcatcctatatgatttattatgcattccctatttatttctttattgtctgcttctcccactcgaatgtaagctcctggagggtaaaaactagtctgtcttcctcataactgtttctctagagccctgaacagtgcctggaatgcagtggtacctcattaaatgtttgatgaatgactaaacgaattaaaattaaatatctctgaatagcatcattagcacatgtgtaagaatatcattaagataaattcctaaaagttgaatgattgcatcaaaaggtatgtgcttttttttttttttttttttgagatgagatctcactatgttgccttggctggattggctctgaactcctgggcttaagctatccttctgcttcagtctcccaagtagctggtagtatatgcatcttatattttagtaaatatgactgtattgtactccatggagtatgtactaattagcactcccaccaacaatgagagtgggacatctccctccctcaatctgcatggcctgcgtgtgtgcatgtgtgtgcaaatgtgcatgtgtgtgcaaatgttcacgtgctcacacatccatactcagtgtgctccacacacaggcacacagagacctgctaccacagtgctgccaggacaagcactgaaacttctgactccccagggacacagattctggtgctgggagaggagaaggaggcccctcacactctcgatcaagggtgtttgttcatcctctcttctctccccgccaccgtacacttcccagacaggatcaacatttgcaaattaccttccaggactctgactatgagacacagcatggcagcacctagttcaggcctagctcaataaatgtttaattaattaatcaatcaagccaaatcaaagattaggttgattatccagatatctttatctatgtggaagtaggcaactggttaattgctttttctcttttgtaaaattttgtactgaaatgataataatatatttgagaattgcacagatatgacctcaaaggtcaaaagcctggtaagtatgaaatattcccagggtgtccccaggggcagactgctgcgaaagcaattatcattatcctaggagtcaatgccttggtgttgccatgatgctgaggtagaaaattctctggcttatgatggaataactaaaatccacaaatatggtctgttacaggaaggggttccgatccagacctcaagagagtgttcttggatctcgtacaagaaaaaattcagggagagtccacggtgcaaagcaagtttatttaaaaagtacaggaataaaagaatggctactccatagacagaacagccccaagcactgctggttgcccatttttatggttatttctcgatgatatgctaaacaagggtggattattcatgccctcccctttttagaccatagagggtaacttcctgacgttgccatggcatttgtaaactgtcatggcgctggtgggagagtagtggtgaggatgatcagaggtcactctcatagccatcttggttttggtgggttttagccagcttcttgactgcagcctgttttgtcagcaaggcctttatgatctgtatcttgtgctgacctcctgtcttatcttgtgacttagaatgccttaaccatctgggaatacagcccagtaggtttcagcctcattttacccagcccctactcaagatggggttgctgtggttcatacgcctctgacgattttccccactgtggctgtccatacatatgctgatcatgaggacaaaggaatgggttattgcataagattcttaaccgtgcctctccctgtgggattccagcagaatctgggcatgccacagctctgtgagaaaatattaggttgaggccgggtgcagtggctcctgtaatcccagcactttgggaggcagaggcaggtggataatttgaggccaggagttcaagaccagcctggccaacatggcgaaaccccatctctactaaaaatacaaaaattagccaggcgtggtggcacgcatctgtagtcccagctactcaggaggctgaggcaggagaatcgcttgaacccgggaggcggaggttgcagtgaactaaaatcgcaccactgcactgcagtctgagcaatgaagtaagactccatctcataaaaagaaaagaaaaagaaaaaaaagaaaatattatgttgggtaaagtgtaggaaagtgaaaatctggtcatcaaacaactgcaatgaggagagatgcagtgtggttactgtgcttcatagatttcccacggagagtggtgatttctacgaaaccccatccaagagccctgtgggcatcccatgttcgtatccctaagttcctcatgtcgtcacttaagagccataaattatctgccttactttcatttacagatcagaaggtgctaagatttttgtgccattgcattttgctgcaggaactagactagggctttttggatattaatctggttaaaattgtgctcttggcggatttgggatggaataaaataacagcatcccgagggccttctctgcaaaatccacaaccaggcgcccagggcggatacatccagaacctgccactcccctgtcgccggcagcagctcagtctaaactggcccgggacctccggaaggtgcagtctgcagagcgggaagccctagcaggttcaatacaactagaaattttggggtaacttccagaagctggaaaaaataattcacaagttccccttactttctaaagatttgcctttgatttttaaaacgctcttttgggtcgagttggatcactcactcacacattcgtctgggaggcagtgatctggcagcagcccatgcctcagaggctgccaggaggactccagcggctcatcgaggcctccgattccttgcagtctgagccggagcgcagagatgcgtgatcccgaccataagcgctgccttcacaggctgtcggggagtgtgaaccggggacagcagagctggctggcagccccgcagtagccacttcctcctccacccgcacgatgcaaacactcagaaagatcaatagctgttgcttcagaatttccctctgctcaacgttgtcaacacatgttcagccacactcagtgtgtgtataagtccacaaatacccgagccaacaaacacattgatcacacgtcgatcttcacggtcgactcaacacctttcaatggtgcaacacatcccagcggagggcaaacttgggcccagctaaggatggatgcccgcaggctcccaaggggtccaagtctaatcaagattcactaaggctttggggatgctaatctggggacattgcaaccatgcagggacatttgtgccatcttcaggcccggatcgcttatgagggaacatgcctccagggtctggataacagatcacatatcagaaagcacagaagtaggccaggcacagtggctcacacctgtaatcctagcaatttgggaggccaaggcgagtggaccacttgaggccaggagttcaagaccagcctgggcagcatggtgaaaccccatctctactaaaaatacaaaaattagccaggcatggtggcacatgcctgtaatcccagctacccgggaggctgaggcaagagaatcacttgaacccaggaggctgaggcaagagaatcacttgaacccgggaggtagaggttgcagtgagccgagatcacgccactgcactccagccttggcaacagagcgagatctgtctcaaaaaaaaaaagaaaagaaaagaaaagaaaagcacggaaatagtgtccagagaggcagcacctggaggcatgggctctagaacaggcatatgccttctggagaactcatgtttttagccatgacgcgtcttccatcaagtgccacaggacgacctcttaacaggtggcagctccagaacaactcggttccaaattacctgtgtctgtctgtgttaaaaagaagaggcagcactgtctttcctggggactctaaccaacagcctcatgagcactatggaaggaacccaactttggcaatacataggcttggggtccagctctggctgtgccgtaaatagctgggtagccttgaccaggtttcagaaccccttggagctttgatttcttaatctctaaaatggggatgatagcattcactccctctagtttgttgtgggaattaaagaagacgcgtataaaacgtttaggactcaacaggagggcggcacgtagaggggcaggaagaggccaacagtcaacccactgtgcagggaaactcggccttcctgtggtctttcctcctgcagggcaaccttccccaggaccctctggaaagcagaggtcagaccaatgtgcttctgtaaagtatcatagccttgagattgaccttgaacgtaagagtgcatcatggacatgcagtgagattggggataaggtagtgcatgggcagcatgcagaggaggcttgggttgggaggaataagaagaaaaccttgtgctaagtgcacccatcccacacacgcagctcatagacaggaactgatgggtgacctcctggaggatgctatcgtggtgcctacgaatctcactggagtgtcctcagcagacactcccacccctgatcttcacgcccacattatggaccttccacaacagaccccacatgcacaacaaggcacgaggagggtgaggactggccctgtgcaggttgccagccagctccccttatccctgcagtatcttcctttttttttaatttttatttttttgagacagagtcttgctctgtcatccaggctggagtgcagtggtgcaatctcggctcactgcaacctccaccttctgggttcaagcgattctcctgcctcagcctcccaagtagctaagataacagatgtgcagcaccacacctgactaatttttgtatttttagtagtgatggggtttcaccatgttggccaagctggtctcgaactcctgacctcaagtgatccgcccgcctcggcctcccaaagtgctgggattacaagtatcttctgagactgctgtaaaaccagtggggactcctggacacctcgtatggccccagggaggagctccagccctgcacggggatgaactgagtggactttggcacacgtaggtggggtacacacaccccatcacacaggcagttgagaacatcgcctatcatcgctgttcaggtccaggaggtcggacttggacacacgatggggaagctgccaggcaagttcccagggcagaaaagcagacattgaaagacgcttctgagaaaccaatttgggaatctgtgtgatatgatatagatgagacaaaagggagaaatgtcattttgcacttcttcctggagaaaaactaaacgtatttagaggaaagactttgataagctgcctatggtttggggatgacactgcagaagcctgttgaagtaataaagatggcattttgaaaataataataaaaactggccaggctcagtggctcaggcatgtgatcccagcactttgcggggggtggatcacctgaggtcaggagttcgaggacagcctggccaacatgatgaaaccctgtctctactaaaaatacaaaaattagcagagcgtggtggcatgtgcctgtaatcccagctactcaggaggctgaggcacgagaatcgcttgaacccaggaggtggaggttgcagtgagccgagatcgcaccactgcattccagcctgggtgacagcgtgagattctgtctcaaaaaatatatatataaataaataaatgataaaaataaggatggcaatcaatctgcctcctaaagagaatcctgttatctggggcgggtagggggaggggcaggcagtgctttgttttattgggtttaggattgtgagtttgaggataagacggagggaagagcttaacagttggacatagagagtagaaaggctttgcaccctggcacgatgaagagccaggtgattggacactgtctaaaggacagttgggaatgaccaagagtggccattggtagccaggaattttcactgaggatgttacaaagtctttgagtcgtgaccctaaaaacaaaactttttccctactcacaacatttctggcacaaaatgtgtgcattttccacatcaagtcattttccagttctctgaagacaccaactgggtacccagtgattcatttcaattctgaccttagctacctggagatgatatcagacctcatacgactgcctcccacgtcacacaccaattgcaagtagggggtcttcaggttgcccacacttctttctgtctgacttggctacaaatcaggggttcccatagccccctcttcgataattcaataatttgctaccataataataataattagaaaataaaggttcaataatttgctgtaacagctcacagaactcagggaaacgctttacttactgttaccagttaactataaagcatataaataaagagtcagatgactaagtatgtagggagaggtctggaaggggcaggaagtccgtaggagcttctgtccccatggagctagctggggtatgccaccctcccggcacatggatgtgttcatcaacccagaggcttgtcagctcccattgttcaagtttttagagcttaacctccagtctgcttcccagaggtcaatgtgtgggaatgaaagttccagtcctcaaattacttggtctttctggtgaccagaaaagctgatctttctggcaacccaagctaaggctgtctagggatcccagactaagctacatcattagcataaattcatgggaccaaagaggctgattatgattaacaaaagactctcctatcactcaggaaattccaagagttttaagatctctgtgccaagaactgggaacaaagaccaactatatttcttatactatcgccttctctgccgaccagggatcattcatgcttttgtgggtaaggacttttggagcgtgtgggaacaatgtctaggttgatgtgtgagcaaaacacacacaacatgcctagacacaggagccaggggatgagggcagagctgctatctatgctgtagcaggagccagaggcttggatacagacccagctctgcagctcatgattttcataagcagccgaaatcagaccactgcactccagcccgggcaacagagtgagactctgtctcaagtaaataaataaataataaaaatgaagatggccttcaatcttcaatcaaaaaatcatctgccttctaaggagaatcctgttaactggggcggaatgggtgctttgtttcattgggtttgggattgtgagttagaggataggactgcaggaagagctgaacagttgggcaaagagaggagaaaggttttgcaccctggcacaatgaagaggcaggtgattgggcactgtctagaggacagttgggaatgaccaagaggctctggaaaagccccttcccctctctgggttttatttatttactcaaccctaaaatgggctcatgcgtttccaaccatcacattctaggattctgacttaagttcagcactctccacaatgcaaagtggggtgatagcatttattaacagagcatttgtgcattgatatggaatgtacttgctgcatccccacataatgaattttctcacaaattatatatgctaagaactgctcagattaaactgtaagatcacatcagatgcactattgattttcgttattttagttttctccatccctgagttttctgcaatttatccgccaatttcagcagaacaatctctgcctcctctttctagtaatcagttcataaaacttcagaacttgggagtttgaggaactaggctagtttggatacaatacctgtccttctacagggatgatgactgtggacctcctggagtcagtagggattcctctggctagagcagtagatgtctttcaatggcaacgtgaatcaacagccatgcctgtatacacactcttcttatgaaataaggaaggctggacactgtggctcatacccatagtgccagcactttgggaggccgaggagggaggatggcttgagcccagaagtctgagaccagcccaggcgacatggtgaaaccccacctctacaaaaaaatacaaaaattcaccgggcatggtggcatgaacctgtagtcccagctacctgggaggctgaggtgggaggatcgcttcagcctgagaggttgaggctgcagtgagccaagatcacgccattgtactccagcctggtcaacagagcaagaccatgactcaaaaaatagtaataaaataaaagaaagaaagcaacttctgttatgaaaaaatatcctgctaatgcacaaatgctttatccctctattattatagctgcccactggggaacactagcagcgcttctccatggacgctctctggggtgcccagtttcccatccattttgcccttttgaccctgtttccttgcaatgactaggccgtacagtttctaggcagccccagttccctcaaaagggcaagcaaggtaattttccagcaaaggaggcccctcctgactttgcaagggccatgtagggagctgagatcctcgggtgtccttttcagaatctctcctctgattcattgtcatcccagaacagattagctctgcaaacaaacaccaaattattaaaattggacactgctctgcctctgacatgggaaacggttacagatagctttgtatagaatgacttctatgacagagcaacaagatgtacaactccaaggctattaaaaacaaagcaagatgaaaagcaaaaccagaagggctgctcacccaaaaactttcacgggaacagcaaagaagtcaagggattattcatgagaaaaagaccacaaatagagaaacactcaatggcttaaagtgtgagccttggagacttgcaatgagctcattcatcactcacttacttttgtacaaagggccgagcgctgtcctaagtgctggatcccccacaactgagaacaaccaacaagatcctaactcctctgacatttaaatacctgtagggggccaggcgccatggctcacgcctataaacccagcactttcttgagtccaggagtttaagagcagcctgggcaatatggagaaaccctgtatctaccaaaagtacaaaaaaaaaattgccagatgtaatagcatccacctgtagtcccagctactcgggaggctggggtgagaggatcacttgagcctgggaggtagaggttgttgtgaaacaagatcaagccactgcactccagcctgagtgacaaagtgagaccctgtctcaaaaaaaaaaaatcagtaagaggagaccaacaattaagttgtaaacatatcataaacaagatgacttcaggttggacatggtggtcacacctgtaatcccaacactttgggaggccaaggcaggaggatcacttgagaccagtagttcgagaccagcctgggcaacatagtaagaccctgtctctacaaaaaataatttttaaaaattagtttttaaaaaagataacttcagaaagttgtaaattctattaagagaacacaacagaatagagtgattgagagatattggcagggtcacagacgccactcctataccctgggtgtttaggaaaagcctctcaggatgtgacattcaagtggggtgcagagaagcaaaaaaactcaggctaactcctggaggattttggcttgagcaactccagtgaaaatgaattatcagtgtgtcaggatgaatgataaaccctttccattattcttgggagggacacaaagtattctttttgttttgtcgggagtttaggagccaactcgttagaaatgtaagcggtggcaacattccactctgcaacctgagaaatacttgagctcttctttgcatatgatgatttttaacctatttcttcagaaaaacaaactccaagcagaggttcgaaacaaatgctggcataagtgtcaacatccactttgtgaaggctcaaaggcaggccctttctctgccagaaatgtgtttctcatctgcaaagggcaggagaggccttaacccaactgtctggttgatgatccagacttcaaacttaacccagtgggtcttggagccaacttaatagagaatggagtgtctttgttgaaaactctagtgtgttttgtggaggggagtgtgcaaaagccagctgaatgtgcaagggagggatgagattatagaagaggcaaaatatcaaggaagagaaactgcaaacagattcgtgagactcgattggctgcgtagcagcaagtatcatttctgtgattcctgtaaaggaatcacacgacgacttccaagtgcatctgcttgctgtgtggatggcctctaatgagacacagtttctagccaattgggtttcacaccgctcagtgccagcttggcgatttgttttgcattaaacactgcagcctgttaacctggtgagtaactgttctggatgggcagccagaatccctcactgaactgcccttttttcttaaaagaaaaagaaaatgatgatggtgggggtggtgatgatgatgatgaaaatgcgatcaatcaggttaccatcttaaaacttgaattcattgagttaaaatgacccagataatgggccttttaaaaatattttcggccgggcgcggtggctcacgcctgtaatcccagcactttgggaggccaaggcgggcggatcacgaggtcaggagatcgagaccatcctggctaacacggtgaaaccccgtctctactaaaaatacaaaaaaattagccgggcgaggtggcgggcgcctgtagtcccagctactcgggaggctgaggcaggagaatggcgtgaaccccagggggcggaggctgcagtgagccgagattgcgccactgcactccagcgtgggcgacagcgagactccatctcaaaaaaaaaaaaaaaaaaaaaaaaaaaaaaaaaaaaaaaatattttctgggccaggcacggtggctcatgcctgtaatcccagcactttgggaggccgaggcaggtggatcacttgaggtcaggagtttgagaccagcctggccaacatggtgaaaccctgtctctactaaaaatacaaaaaattagacgggtatggtggcaggtgtctgtagtgtcagctactcgggaggtggaggcaggagaattgcttgaactcgagaggtagaagctacagtgagccgaaattgtgccactgcattccagcctgggcaacagagcaaggatccatctcaaaaaaaaaattctggaacattccagggtagtgctcaatcctcaatccatttttcagcctttctgtgccctctgctcttgctgggagaactaggcctctccgtttctttcatttcagtctcaagataatttagagttctggagtgcgcaacacacttgggaattcgacctggaggtgactgagctggggcctgggggcagtggaggggagcagtataggaacaaagacatcagacttcataaatctcaactgtaaatgtaaaagtcctcctgtgtctgacaccaccagaattgtaggatttttcttctttaggtgacaaaaatgaacggtccccagcagaagcagtctgtccatggtctctttctcattggtccaaataaacttaaaaccttgtgctaggccaagagtctggatcccaaagcacactcaccaaggctccatttgagccccccatttaccctgaaaatactgtggtcaccctccccgcattcctcctacctctttccacagcagaagggagggggtgtgtcagctgtgataccatcagccaccaatgtgtgtcaccgctccttccacaatgggacgcttgctgggaaaaacagctcattctcaagcctccttccctcgaggtcagggcagggcaatggtggggatcagtctctgcagaagaagaatcttgattttctggatttcagctgcaacttctgcttcaacaagaactatgtagagcccatcagaactattaggctgctgaaatgagttgatgaaagctatgccccatccacatgtgaaacttacagggtgataataaaaggtttccgtggcaatgacaacaaatgttttgtttctttgtttgttgcttgtttttctaggcacttccaccaggggatgcaatgaatgtttttgacctacaatgaaaaaaaaaagtcttcttagcttgcagaagtcaggaaagattgtgtgcacatgcatatgtgtttgtaggtgtttgcatagtgtacattaagtgtgaggtgtgtgtgtgtgtgtcactttcaaagtaccagaagccaaatcatctgttgattttctgacaaggtacatggtccttttcaactaccaaaaatagaaagatgaccataagcagatgaatattgtcagaaagcacacaccagacagccctgagcatttgattcagctgacattggcaactgttcacagtgagtttctgctcccatcgtggtcaagacaatcctccaagcactgtggcccctaaggccaagcccagaagttgcagggctcattggtttgacaccaatatgtgctgattaagaagctgcaccctggagaaccacaaattgttttaagcattttgtgatctaacatcttttttttttgagacagggtctcactctgtcgcccaggctggagtgcagtgctgtgatcatgactcactgcagcctcgattcccctgggttcaagcattccctcctacctcatcctcccaagtagctgggaatacaggcatgcaccgccatgcccagttatgtttttggtttggggtggctttttggtttttcattttgtttttgtggagacagggtcttgctatgttgcccaggctggtcttaaacttctgggctgaagcaatcctccagctttggcctctcaaagtgcagggattacaggcatcagccaccacacctcgcctgtgatctaacatcttaagatttcaagcaaatatgattactttccaaaagagaatacttccccagtgcttctctcaaagaacccagggttagcaagccatttgagacttgtttggtgaagtgtttgtgagatgattccataacatataaaagaaacttaatcaaggcaatatgaggctttgtgaaaattaacagacaaataacgggggctctagagttcaatgcagaggactgggctgtggccagactcccaattgcaagagggtgacacacatcagtacacaaagaagcaaccagcaggcaggtcacgtctgaaatacataaacccatgctgtccgtaatgcaattcaaagaacttgtcgtgctagaccattttacataaatattttccaacatattcaatcagccccctcaaattgacactgtcaccaacatcaaatcaatacttcttgggagggaggaataagtatcttatctaataatcaacttatttgagatctgcaatgctggctgctattaccgaaagacatttctcaattatttacatttaactatacattactttgatttttgtctcagctgcattcagataaaatgtgagcttctaatttaatttttgtctggatttcctgtgacatatctatttatgccaatttcccaggaggaaatggacatcagtaataaagatagttatagaaaacacttacaaagcacttttagcatgccagactctggtctcaagccaccatcaggattgtccacttcaatcttcaggcaagtctatgaggaggccacagattgatatccccattttatggatgatgaactggagctgagattaagtgtcttatccctgagatttgaccccggcagtctgactctagagccctgctactggcaggacatggtgattcccacttgaaatctccgcactttgggaggccaaggcaggaggatcacttgagcccaggagttcaagaccagcctaggcagcaatgcacgaccctgtctctacaaaaaattaaaaagttatctgggcatggtggtgcgtgcctgtagtcccagctacttgaggggccaaggatggaggataacttgagcctgggagttaaagactgcagtaagtttttatttatttatttatttatttatttatttttacttatttatttattttgagacagagtctcactctgctgcccaggctggagtgcagtggcacgatctcagctcactgcaacctctgcttcccagattcaagtgatcctcatgcctcagcctcccaagtagctgggattacaggcgtgcaccaccatgcctggctaatttttgtatttttagtagagatggagattcaccatgttggccaggctggtcttgaactcctggtctcaagttatccacccaccttggcctcccaaagtgttgggattacaggcatgagttaccacacccagccctgcagtgagctttgatcataccagtgggcaacagagtgagaccctgtcactaaaataaataaaataaaataaaaatagatccctgcttctaaccactgcacagtcccacttcacagtagcatgagtaattccaagcagagatttccataccattttctgctctgagtcagcagataataagagggtcatgatgttaacaccagaatggacctaagtgatgaccccatccctgaagaaggtcaaagccacttccgtctgctgttctgctctgccgtttgatttccttctaagatgtttgcccttctctaggagttttgtacaagacttgcagcctctgtctattgcattctttagacaaacggtgttttctgagttggactagaagctaaagaaaggaacatgtggatgcagtgtggcacacggatgaagcctgcctgcatcaaaaccccagctcatcctctattaacgatgccttccagtggaaggataaagtcaccgtacctcagcgtcttcatctgtataatggggatgatcataattcctctgcaatgtggggttaggaagaggaggacaagaaaccacacatgttggccaggcactgtggctcatgccagtaatcccagcactttggaaggctgaggcaggctgaggtcaggaattcgaaaccagcatggccaacatggcaaaacactgtctccattaaaaatacaaaaaaaattagctgggcgtggtggtgcacatctgtagtcccagctacttgggaggctgaggcaggggaatcacttgaacccgggaggcggaggttgcagtgagccaagaccatgccactgtactccagcctgggcaacagaatgagactctgtctgaaaagaaaagaaaaggaaagaaaagaaaagaaaagaaaagaaaagaaaccacaccacacatgtaaagagctcaccatgctcctggcacagagtaactgcttagttcttggttatgggtcacagtcaccccggagactctccctgcaccacaccctgcacagcacctgctctgggactttgttatacactctctttctctgctgttctgtgactcactcactggcctgggttgtgcctcattcatctcaggagccccagccccaacacagttcccagcccgtagctggcactcgtgaatgtctgctgattgagtgagtgactgcatatatgcactcgctgcaaccccagctcactgcgcagacgaggcggcaagttcagagggaccaagcctctaactggggccatggaactggatggtggcacagttaaagggcgactgaagctgcttgacttccagtccaatgtctgcacaccacagcaccttaacttcttgctcagtcacccaggctggagtgcagtggcacgatcctagctcactgcagcctcaacctcctgggctcaagtgatcctctcacctcagcctcccaagtagctgggaccacaggcaggctaattttattttttttatagagatagggtcaccttatgttgcccaggctggtctcacactcctgggctcaaagagatcatcccacctcggcctctcaaagcgctgggtttataggcacgagccactgctcctggcctgcaattttctttaaaatgtttttttgttttgttttgtgttttgttttgttttgttttgttttttcttgagacagagtctcgctctgtcacccaggatggagtgcagtggcgtgatctcagctcactgcagcctctgcctcctgggttcaagtgattctcctgcctcagcctccccagtagctgggattacatgtgcccgccaccatgcctggctaatttttgtatttttagcagagacggggttttgccatgttggccaggttgatttcgaactcctgacctcaggtgatccacctgcctcagcccccccaaagcactgggattacaggcgtgagccaccacacccagcctaaaatgattttatcacagactaagatcaaacggataaccagagcatcattaatatcaaactagggatacgttcacaatctatttttcctactttccataatttacatgtcagcaatccatcacaaaatgaaaaaaaagttacaaaaatacggacctaaacatttttagtgtcttgcattttaactaattacacagtaatactatgataatctaattgcaattgacaagataaaaatgcacagtaatcatgtattgcacctgatataggcaatattacatgacctaatatcctgccttttacgtgcctatttcattccttggaagctccctggtaataaatatgctattaagcagggcttttttaatttgcatgtttcccttatagtgattcatcaataaatttttctgatttccttcataaataagtttcattattcctcattatttaaaaaaacaaccactttctcctgtcctgaaaggatgtcatatattagatgaccttcctatataaaatcacaaatgagagaagaccagacaacctgcaagaaaataagtaatcagacaatcgggcattaaatacagctgggcagacagtaggcattatggtatagtctgcaaaaaaggccagaggcagtggctcacacctgtaatcccagcactctaggaggctggggtgggtggatcacttgaggtcaggagctcaagaccaacctccccaacatggtgaaaccctgtctctactaaaaatataaaaattagccgggcatggtggcgggcgcctgtagtcccagctacttggaaggctgaggcacgagaatcgtttgagctggagaggtggaggttgcagtgagtgaagatcacacctctgcactccaacctgggcaatagagtgagacaccatcttaaaaaaaaaaaagagtctgcaaaaaaaaaattttacaaagcaaaaatcaaaagagaatttagttttactacagcatgagttaagtctcagcttttgcacaatttatccatgatttcttcattttgttgttttaagcatgcttttaagacatactggataactagtaaaaattgtatacaatttcaaatgacatttcagataagttttattgacttaatgctctgataataaaattataacaatcagtattattctgatttattgcaatttttactttcattttgtaatggacttggtgcattccagcattgaatgtaatgttgctgccatctcaaggtcactcactgaaaatgaggtggctcactccagtttagtgcactaaagcacatcagtaaccgagggctttatggatgaaaataccactttgtggtcacgtcgcagtaaatctaaacttttatttgcaatgaaacaatgggttttatacacaattttaaatgaaaacatactccagtcatgctactatggcaatgtgagtaccggatctgtgagagaaaaggcttttatatcgcagtccaggggaagaaatgtcagtgcatgaaattgaagaaccatctgtgccactggcatattgacacagcgtcatccagatacagtggtttctttagaaagagacatcgtccttgagtttatttttcgttcgtaaagcacgcttggctattttccctccctcttcaatctttcccagttggtgacctccaccaccctgacactcttccgtctggatttatcaaaactacccttaacatgaataaacagttcacggaaaaggaaatgccaatgagccgattcaaggagatacatgttttgcctaacagattgtcaaagatcaactttcgatcacactggtttggcaaggtagtgctgtaaattaaaaaagaggaatatgtggtgatagtttccaaattttaaaatgcatataccttctgaccagcaatctcatctctaaaaatgtatctgtcagatctatacatacgtgtgcacacagagatgtatgtacaaggaaatttatcacagcaaaagactggaaacaaactaaatgtccatcaacagaagagatgtaaattatggtcaatccataaaacggaacactgtacagcctttgaaatcaacaaggcagctctgtatgtaccgatatggcacaatttctgagatcatacagttaagtaaaaaaaaaaaaaaaaaaaagcaactgcaaaacattgtgtatagtgtgcttagggtgtacgtatttgcatagaatctctgtggaaaacacaatcagccactaacaatggttcttttgtaggaagaactaggggactggtaacagggtgggagagacttacaattcattataaactcattttgttttgaattgtataccgtatataagtattaactacttgaaatgtacacataaaaataagacacttccaaaactgctttggattgtaattcaaataaaaagtcaatatttacgaagaaaagactggccaggctcaatggctcacatttgtaatcccagcctgttgggaggctgtggcaggaggatcacttgaacccaagagttcaagatcaactttgttttggacaacaaagtgagacccgtctctacaaaaaaatataaaaatcagctgagctggtggtgcacacccgtagtcctagctactcaggaggctgaggcaggaggatcgcttcggcccaggaggtcgaggctgcagtgagctatgattgcaccactgtactccagcctgggtgacagagcaagatcctgtctgaaaaaaaaaaaaagaaagagagaaagaaagaaagaaaaaataaagaagggagggagggagtaggggagggagggaaagaagtcacagaggagaggacagaagtagaaggatacaagaagggcgggtgggggctgccactgggggacaggggcttgcttcccttcaccgtccttcccgcatccccccttgaccatttctctgttctaatccagcctggattcacatttctttttcatttttttttctttttttttttttttttttttttgagacagactctcaccctgtcacccaggctggagtgtagtggcacaatttcagctcactgcaacctctgcctcccaggtttcaagcaattctcttgcctcagcctcctgagtagctgggattacaggcatgtgccaccacgcccagctaatttttgtatttttagtagagatggggtttttccatgttggcctcactgaggctggtcttaaactcctgacctcaggtgacccacctgcctcaacctcccaaagtgctgggattacaagcgtgagccaccgtacctggcctgaatttgcatttcttccttaatctcctcacatcttccattctcctctcacttcccatttattctcctctgcatttccattcactctcctagtggtcaattctcatttcaatttctctggtttctcatgttctgcctgtctctgaggattctccccagccccctccatgaggaggaccagagccagcccttctgtgctcgtgccagtgtacaaccgggcttgccaggtacacactgcgtgcacccgggacgcccaaatagtgtgaacaagccgcgttgcggttaacagccccatctgtcatctgccctcttctggaactcaaagtgttcagcagagagttgtctgtgtatcttcttctctaagtccagataccacagtgatgaacaatatatctgccccttgaccagcactggccaacatgtagaagaaatgcatccaggatggggtctaaaaatctggagatatttcacgcatttggggtgggtctcagatagggacccaggaacacccagtactagctgaatgtctgtactgaatacgtcagcagaggtggtaagagaactccacacacagaggagaaaacggagctgaaggaaggaggtgagtgcctccaactgttccgcatcatgcgtttactgcatttaacttgctttccctttttcctcttttattaaagcaaatctcctgctatgtttataactcctttcaacggtacgtcaacggtgaagccaaaattctatttaacattgctcaataattcaaattccatcaaacatccatcaaaatacttttataagccgctgatatgaagcatttcgaaaaggtgcacatttcatctctccaaacccacacaggaactggttggttttcttttgatattaatttgaaatgctacagtccaaaagattaggattcctgcaccgacttagtgagtttttcaacttgatccaccttgaaaacagacacattgtttttattctatttgatggttattgcaaaagttacaagcaaaccaataaacagtttatgtcatcttaaagagatgccttggctgggcgtggtggctcacgcctgtaatcccagcactttgggaggccaaggcgggcggatcacgaggtcaggagatcgagaccatcctggctaacatggtgaaaccctgtctctactaaaaacacaaaaaattagccgggcgcggtggcgggcgcctgtattcccagctgctcgggaggctgaggcaggagaatggcgtgaacccaggaggcggagcttgcagtgagccaagatagcaccactgccctccagcctgggcgaaagagcgagactccatctcaaaaaaaaaaaagagatgccttggcagatttctggcatatggaaatccttctccatttttctcacagagaccctccaagagaaggtgaacatggtaagccctgccacaccatgttacagagattctccagaaaggaaaatggtgcagaaactgggcacttggcaggatggttgagcccaggcctctgctccgtgagctcccagctgcaccacctctctgcttttcccatccctgagacccttccagctctaaaattctacgacattacctctgagataaacaacagaagaagagcaggacagcaaaaatggagagcaatgaaaagtatggccaggcacggtggctcacacctgcaatcccagcacattgggaggtggaggcaggaggatcgcttgagcccaggagttcaagaccagcctggtcaacatagtgagctcctgtctctactagaatattttttaaataggcaggcatggtggtacctgccaacagtcccagccacctgggaggctgaggcaggaggatcacttgggcccaggagtttgagaccagcctgggcaacatagtgagatctatatctctacaaaaaaaattaaaaattagccaggcttggtggcacatgcctgtaatcccagctactcaggatgctgaggcaggaggatcacttcagcccagcagccggaagctgcaatgagatatgatcatgccactggactctagccgggacaaagcaagaccccaactctgaaaaaagagaataagagtatacaatgcatgcgggacttaaaatctagatgatgggttgataagtgcaacaaaccaccatggcacatgtatacccatgtaacaaaccagcacattctgcacacgtatcccggaacttaaagtaaaataaataaaaaataaaaaatgtttttaaaaaaggaactgtgttagaataaaagacacttgagagactgaaaaactatagaaaaaaaaaaaaagaaagaaaagcttaaatcaagcctgagtcccaatcagagacaggaaatggacttccattgtcttcccatttttttgggattttacacagacacgaattaagagagactatttttcttttgcctccagatcccttcttccaccttctgtgtaatcatctgcaatcatctcaagcatataaatagacacttttaaaagcacccccacctcaggaggtgtccaaactgggttttgaaatggcaccctggaaatccaagatctcctgaagatgcaaggcatgacataaaatgaggacgcagtgggcagatgtgatctctgagtaatggctggggcttcaggaagctgacccctgaaccaaacaagcaagcatggtggctgcagaattatggcccatgaaagagccaaagggtgggattaagagacagatggactcccggctgggtgccatggctcacgcctgtaatcccaacactttaggaggctgcggtgggaggctcccttgagctcaggagttcaagaccagcctggacaacatagtgagagaccccatctctacaaaaaaataaaaataaaaattatctgggcatggtggcacattcctatagtcctagctactctggatgctgaggcaagagaatcacttcagcccaggaattcaagactacattgagccataattgccccactgcactccagcctggacaacagagcaagaccctgttccaagctgggttttgagatgacactctagaaatccaagaaaaaatttttttttttttttttgtagagagatggactcctaaagacagtacttgggagtggagaaggaattatctacaagggaagaattaaagagaatgaatgcatggtagggcactgacctcatcaaccaaggaatctgagatgaggcctgccatgaacaacactggtgaccaccaatctgatatggggtctccctgttgactctatcccagcattgtacagaagtggattggacagaattactgcaaccaccggcgttacagggtttcgaagacttttattctgcatttaagagatttacaggaaatctccaggcagttaagctgcggggctgagcgtgcctctcagctggctggaagccaatcatttggagggtcgttctaattcctgggatatgcagtcatacagtcaggaagcagccctgaccccgctaaggtcagtgtcgtggccaactaccctgagctcaatttagagacataactatggcaacaactgtgcccaatcggttattagaggagatttattgacggatatgcttgaatagcagagccattaattgcaattaccagacaagacactttgttcatctcggggaactgaatgccaaaatgccctaacaactttaaaatcgcatttgctcttgggcgctccgctggtgtcactgcacctgcccagcttcccagtcctgagatggagaggataaggggctgagcctgacatggcaccagctggagaaatccacagtgctgggtcctgaggcacgaggcagaggaaccttccatagaccctgcaaggcccttcacagaggtgagggaagcatgagctgtcccgctccacccagcgccccttctccaggtctgttctcacactgctataaagacatacctgagactgggtcatttacaaagaaaagaggtttaattggctcatggttttgcaggttgtacaggcttctgcttctgaggaggcctcaggaaacttacaatcatggtggaagatgaaggggaagcagccatgggagcaggaggaagagagcaggctgggtgcagtggctcacgactataatcccagcactttgggaagccaaggccggcagatcacttgaggtcaggagttcaagaccagcctcgcaaaaatggcgaaaagctgcctgtactaaaaatacaaaaattagctgggcacggtggtggacacctgtaatcccagctactcgggagactgaggcaggggaatcgcttgaacccaagaggtggaggttacagtgagccaagattgtgccattgcactccagcctgggcaacagtgagactccataccaaaaaaaaggaagaaagcgaagtggaaagtgccacacactttttttttttttttttttttgagatggagtcttgctctgtcgcccaggctggagtgcaatggtgcgatctcgcctctcggcaacctgcacctcccaggttcaagcgattctcctgcctcagcctcccgagtagctgggattacagacgtgcagcaccacactcgggtaatttttgtatttttagtagagatgggggtttcaccatgttggccaggctggtctcaaactcctgacctcaggtaatccacccacctcagctcccaaagtgctagggttacaggcgtgagtcaccacgcccggcccaaagtgccacacacttttaaacaacgagacagtactggcaggggggtgctaaaccattaggtaccacccccatgatccaatcacttcccaccaggccccacctccaacactggggaatacaattgcacatgagatgtgggtggggacacagagccaaaccatatcagatctcaccaacagagcactggaatatcttctgcctttgctctgccaatccacacctgtcatttcctttgagatttccctaagtggccttgctatgtttggtggtgttcggccctggctctaatcactttgtggtcccctgagcctggaagagtcagtccctggatatcagccttctggtcttcctcagggcagcctcctctgaacaccccatttctctaaaacaggaacctccacctccctcatgtaccttccatcccttcactctgttctagtttcatccagcactgaaattacacttcgcattggtctgcctctttgcctgtttatttccgtctctttcactagattctaaggtccaggagagcagaaatttggtctattccttccaccactgtatccttggtgccaagtacagcacccgacacacagctggtactcaaaaaatacttatttttttgtttgtttgtttgtttttctctgttgtgttcttgtttttgagacagggtctcattctgtcgtccaggttagaatgcagtgacatgatcacagctcactacagcctcgaactcctggcctcatgcaatcctcccacctctgcctccaaaagtgctgggattacaggcatgagccactgtgccccttgagaaatatttgttgcatgaatgaatggactcagtacattctgaagttgtgcttacagggaccttctctatccaactagatcatggcttctgtgaaagcagggattctctccctactcatcccttcttcctcagcaccgtgcataacttagatgctttaaaatttaagcaagtgaggccaggtgcagtggctcacgcctgtaatcccagcactttgggaggccaaggcaggcggatcatgtgaagtcagaagttcgagaccagcctggccaacgtggtgaaatcctgtctctactaaaaatacaaaaaaaaaaaaaaacctagccgggtgtggtggctggcgcctgtaatcccagctacttagtggggctgaggcaggagaatctcttgaccctgtgaggcagaggttgcagtgagccgagatggtgccactgcactccagcctgggcaacagagcaagactccatctcaaaacaaacaaacaaacaacaataaaaaaaagtaagtaaatgaatgacattgtgaaccacaaacactatccacacatcagaataagaaaaagcacatgtccaccacttttctagggaaaaataagagctaacacttaaagaatgctttctcccgggagagttgtaagtgctctccaaggtattcattcataaaattcacaggacaacactaggagttgggggatagaattttctgctcgtgaaaggtgaggacttggagttacacagctagcaagtgacagtgatggaaacaggtccaggcactccagacagaatctctgcccttaacccccatactaggctttctctttcttctgactttgaaaactaggataaattcaaaaacaattagaaaaacatcccaagagaggactttgggtgctaaccctctgctctgctcccttgagtttatcttttattttttctttccaagtagattgcaagttacaaatccctgctccaaattaagatgtcacgtgataatctctcccttacaggttaaacttcaagactatgcttaacctgcggttagtgaggcacatgaaggtctttccaagagagagttgaatgcagctcttccccgagctgtaagaatgcaaccccagattaaattggcagagcgaaggcgggagcaggcagagacagcttggactctctgccaagggtgtagagtacaagaatttccagctaacaaagatgaacttctccactgatgcaaaactggccccctcaggtgtccttgtgatttacatcatttcagtgttaatatgcaggggggcctttgataaataagaccctttaagtaactggaattttctatactcaacactaatgcccactaatgttaattaagtatttattgaaatcaaaatttctggccaggcgtggtggctcatgcctgtaatcccagcactttgggaggctgaggcaggtggatcacctgagctcaggagttcaagaccagcctgggcaacatgacaaaatcctctctctactaaaaatacaaaaaaattaaccgggcgtggggatgcacacctgtggtcccagcaagggaggctgagatgggaggattgcttgagccgagggaggtggaagttgcagtgagccaagatcgcaccactgcactccagcctgggcaacagagtaagaccttatctcaaaaaaaaaaaaaaaaaaagaaaagaaaatcaagatttcctcagtggatccaacaacccacataaatataacctttgataacccatagtgtctaccatccagttctctattttacacagttaaatggagcaaagtgatattgggtagacagatctgaagtactacaagaatctactagtaccatgccagatgctgatacaacattgtggacgaccccacagaatccacagtctatagaagggagtggccattcatccccaaactacacagataaactgcaactatagcaaggggcacatggtgttaagagagggtaaagagattttaatctggtcacagaggtcaatgaaggcatccctgagaaaatagctctttcgttaagacctgaaggaagagtaagagaatgaatggggagtagggagagacagtgaggacacggagcttggtgcagctggaaaaccaaagtgtagattggtgaggatgggcaggtgtgatggggctgaggctggggcagtgcccagggacatcaggctggacctcgaagatgaaataaatgtctggatctttatgagcagccactggggacctttaggctctttcagaaagggaaagattcgaggattatgtagaaggtgaaactgacaacctgctatgcatccgttctgcacacttgctgaggcaggagactggacaaacacactaaagagagaaaaagaaaggtcaacagcaagggctgaaataaaaaggacttgctggcccatcttaaggtaaacagaaaaacactgagggcacacatctccagagtggtacagtcaggccaagttttgctactctcagctaactgcaaatgtacacttctgcaaatggcccagaaacgaatctcagagcttgataacaatgagtcaacccatcttcaaccatggagatgggttctattttgcactgctctcactaaaacaaaacaaaaatctaggcgggacgtggtagctcacatctgtaatcccagcactttgggaggccaaggcgggcagatcacctgaggttaggagttcgaggccagcctggcaaacatggtgaaaccctgtctctactaaaaatacaaaaaaaaaaaaaaatagccaggcatggtggcacgtgcccgtaatccaagatactcaggaggctgaggcaggagaattgattgaagccgggaggcggaggttgcagttagccaagatcgggccactgctctccagcctgggtgacatagtgagacttgatctcaaaaaaacaaaacaaaacaaaaaatccaaaaatctataacatagctattattcttgcgatgacaccaacattattatgcatccgtagagcaggatacttgttttaatctgcacaaaaatcacagcatgttcatgctgggaggaaacttaaacattatctgaatatttgtgtacttttccagtattctcacagatgttttcatatatagtttattttctgttaacatgtatgtttggtgtcccctaattaaactacgcgtgtttttcatgtgggctataccatgtgtactgcctttcaagttaccctcattcccatctaagcaccagtggaacacacacacacacacacacacacacacacacacacccttccccacccacacacacacgactgtactcagaggagcttaatcaacactgttagttgactgacttactgacaacagaccaaaggctgcctctgagactgatggtcaaagccatgaaggcaagagatgtatttagtctccatttaaaagaatctgattcggctgagctcagtggctcatgcctgtaatcccaacaatttgagaggccaaggagggcagatcacctgaggttaggagttcaagactggccaacattgtaaaagcctgtctccactaatataaaaatcagccgggcatggtgacaggccctgttattcccagctacttaggaggctgaagcagaagaatcacttgaacccaggaggcaaaggttgcagtgagctgagatcatgccactgcactccagcctgggcaacggagcaagattctgtctcaaaaaaaataaaaatgaaatgaaagaatctgataaaaatataagggagccaggcatggtggctcatacctgtaatcccagcactttgggagaccgagtcagaaggagtgcttgaaatcaggagtttgagaccagggtgggcaacatagcaagacccccatctctaccaaaaaaaaaaaaaattaattagccaggtgcagtagcatgcacctgtagtcctggctactctggaggctgaggtgggagggtcacttgagtccaggagttggaggctcagctaggagtcagtaggtaggatcaggccattgcattccagcctgggccacagagagagaccctgtgtcaaaaaaacaaaacaaaacaaacaaccataggggagagatgaaatgaaccgccaaagacttgctccaccggctcttcaaaggatgggaaaaaccaaaagcggctagaacctgaggccccagcccctctccgtgcaggaaagttggttctgtcactcatgggaagagtggacctggattaaacaggaaagctgagaaggatgccacatccctggttaaaaggtcagggggaaaatgagtatatcaagcaaactgagaggtgttgcaatttcagaagcaaagtaattttcttagatgacagcataagccactttcagctttttcttttctttgatccatcagcgttgccctggccaccaaccaagttcacacagtccaagcagacattctggattgcatcaacatgttagcactcttcgttttcaaaatgtagaccatatatagctaagattaaacctgtagcaaccagcccctagatgtcattgttgctgctgaaatatcaactcttgagtcttggaatttttacatctgaagagatagcagtgttcatctgaataagccccttaaataatgcaaattcaattcactttcggtttttcaaagccaagtccaaagtcttctggacttcttaaccaaaatgcaactaaatcttagggtgttagcacacattcagttgccaacaaaatccgcattcaggaaaaataggctgaaaaacccacgtagtcgtatgtgacattcctaacgtgctcacatcaaattccacgacataagctgattatggagtcgctgggcgattctgcccttcttcttttcgtgtgttgtctgacttctgtgcctgcctctgtcatcggtgtctggagctcagagccgtctgtgccttgcgaacagcagcttccaatcaagggcgcgtggaagagcagaagcgcccaccctgtttccaacaagccattgaatgcgacatattctttgttcacagtgtccttcaactccatctcttccttccatttcatatcattccagtcccagtctttgcaagaacaatactttattgtttactgattgctttctatgagtcagacacacattcggttctttaaacttttcaatggccctgtaaggtaggtatgaagtaactgaggcacagagaggtacagtaacttgcccaggacacacagctagtgagtgctaacaggttttgaagcacagggtcaatgaaaaccggtccacagactagattcttagggcctctctgtggccaactcccttgtctctaactggatgccacgtttattctctttccaagcctccggccctcaatctcacaccctatcttcccaaaagatgcttttgagtagctcctccaataaactttatgcttgggagcatgtctgctaaatgaaatcacttttttcttcgatcattcagtgtttactgaatgtagctacattttaggccctgttctaggccggaagggcaggagagatattgatgaacaaaactgacaagctcccctgggctcttgaagctcatttcccaccagggtagacacgtgttgaggcagtgattacacatggaattaatgacaagagagtgaagtccacaaagacgcaggaaatcacacaagcagagcgcccgacatgggccctccaacagaaggccctcaacagaggcctgctgcctgtctctgcctggcccagtcccagccccaatctgcctttctggccagagctcttcctgctccccatactgagtcctccaaccccagcagaggggtctccacgatccagatagatgccctgtgtccgtgtgcacctccctgctccattcaggttggtccattttcttccacgtgccaaggtgacccattcttgaacttaggtagctcagattctgctttcccattacctggtcctagggatgtccctgcaggtggcctagagatatgagtggaaggaggaggcctgatgcaagagggatggacatggcagcctgaccacctaatcatgaagcttcatgcaccccacagctccactcatgcctaattctggatgcaccacttatatctggcgacagatttctactgggccttcctgccttctggccttgtggagctgaagatgaggccagaaggggcatgcaatttgctatttgcagtgtggatgatacggtttggctctgtgtccccacccaaatctcatctcaaattgtaatccccatatgtcgggagggtcctggtgggggtgattaaatcatgtgggcggacgtctcccttgctgttctcatgatagtgagtgagttctcatgagatctggttgtttgaagtttgtggtacttccccccttactctgtctctctcctgctccaaccatggtaagatatgcttgtttcctcttgcctgatgccatgattgtaagtctccggaggcctttcagtcacgcttcctcttaagcctgcagaactgtgagtcaattaaacctcttttcttcataaattacccagtctcaggtagctctttagagcagtgtgagaacggactaatatagtgaactttctctgggtacgatatgcattttttcctttcctttatcactcatgtctctttctcagtgaaagaaacatcccaggctgggcatggtggctcacgcctgtaatcccagcactttgggaggccaagatgggtggatcacttgaggtcaggagttcaagaccagcctgggcaacatggtaaaaccccatctctactaaaaatacaaaaattagccaggcatggtgacatatgcctatattcccagctactcgggaggctgaggcaggagaatcgttggaacccaggaggcagaggttgcagtgagctgagattgcaccactgcactccagcctgggtgacagagcgagagtgtcagtgtcaaaaaataaaaattaattaattaattaattaattaaataaacatcccagaaggtcaaatactataccatgttccctctgcttggtcttccccagtatacgaagagctcaagctgggaatcttagaagatagactccttgcaatctgcagttatccatttactgatgtcttaagcaagaagtagaactcccagccagtcggtgatgatgccagcagctcctcctagtctatcacctcaaaaggagctgtcaaaataacaaatgacatatttttaagttgcaggattaccccttagctgggctttcttggtttgattagcagttacttttccttttagtgtctttcttcatcttctcctccttcttcttttcattttcttcctctgctccactcatcaataaaggccactgttttcaggaaactgcttccctaggaagaattgaacagtatactattacaatcatattgtcttgttcagaagcaggtggtattacctgtcaacaggggtttggggcagagcaaatagctcccacccagctcggtgaagccactccctggctcctgggtagagaaaaatggccaaagaagagagctctttggaggcctcaaaatctcattttcattccctttgcagagaagagactgactttattgacaaagacgactgaaaattgcttgagcgttccaataaccagtctgcgttgaggcagaaagacagtctggcggaggcaagctccctgctccaccgctagctccgccgagccacgctttcctgcagcaccagtctgtggcatatgcagactagactgaaaggagcctcctgtcggcctcaaaagcagcccccctccacctccactcccagcctgctggtgcgtttcctggatcccaatcacaaatcaacacgaatgcagggaatctctgccagacaccaaactcttaggctgattcaggagcttggggtcaggcctaagttggcttggaccaggcacaggtcccattttccactggagtgccctgtggcttggctgcacattgcgcgtgggccactagatgtcaccattattgattcttgtccttatacccaggtcctgagtctaagacagggtctcagggctaggagaactctggagagaattccatcgcagcgttgactgcagggctgctatatttgctatgtctgagttcctcggtgggccttttctaaataagttagcatctcagccccaaaacagctgagctgcaaattaagcaaagaccagtattagccagagccaaccctgattttcacaatcacgtcccctgccctttctcctcctcttcatcgtcagggttggtcattatgcatccttctggtttacttgggccctcaataagaaataaattaatatgtatgcctcatagcaccaaggattttagatgttgatgtgctgttgaagaaacataggtctgtggcttttagcagagaatgaatgacagagggataatttatgatggtccttgagacctgaactacaattatgaagtatttctaggtgtatattcaggatgcaaagtgcaaggaacccagagctaatgttaatttattactgacagctgtatatataataatatatcacgtcttttcatcttacattccttctgacttacatcaagcaatcttttcattcattaataaaatcaagtcttgccattattcttaatgatgaagtcccatcttgaacccagaggactcctatcattaaactccgtgcttctatataccagtcatctgaagctcaaaaaaaaggataaattgaacttcttgttttacaagcaaggtgaaaacatcggaaagatagagcccacttgctcacagtcccacaagggctaagtagcaaagtcagggacaatttcggggtttatttttctcagctcgcactaccacatccttttttgccttttagctctcttgcctcctctcacctttctacaatctctccttttttgaggcagtatttttttttttttttttttttttttttgagacggagtctcgctctgtcgcccaggctggagtgcagtggcgggatctcggctcactgcaagctccgcctcctgggttcacgccatgcctcagcctcccaagtagctgggactacaggcgcccgccactacgcccggctaatttttttgtatttttagtagagacggggtttcaccgttttagccgggatggtctcgatctcctgacctcgtgatccgcccgcctcggcctcccaaagtgctgggattacaggcgtgagccaccgcgcccggccgaggcagtatattttttaaaggtcatgataaaaattacaccttaaagaaatacgggccacacgtctcgtccaattttcggttctgtgccaaagacttacatgattaatcccttcaaaacaaatctaatctaatcttatcacaccaaagacaaggtgtccttcataagtattgtggctggaaacaagtaggtcttcctccagtttcaactcgttcaatgtctcattcagtttacaaccagtcatcaccttggcaacttactcgaggcactgtcttcagcgttcccaaaacgtaagtagtgctccagttcagcttgtaaaatcatcaaactccgtggtcactttaggagatacagagacccatgatacttgtagataaagcgaaacctttagcctcatcgactaattaatggcctcaaagtaaaataatgaggtgtgtggagatagggattcagttactgggtcatctctcatctggagacacaatcagattccactgaataggcgctagataactgaataagcgagtttcctatctataatactaaatcttactaggattgtttaattaaatcatgataaataacactctgtggcaggtgagaggtgctgagaagagcttaggtgagatgtccacaagttcaatggaactacatctgaatgcctttgcattcttctgacttaaaaatgttgactgtaactttccagagagttcttttctaggaaagagaaatactgaggtgctgtgtcccaggctttttgaagttgtcttggttttcctatcagattctgcattgtatactttctcagtcttcaggaatgaaggtcctaattccttcattatcattcctttctgcctataatgatttcttcctaatggctctggctgttccaggtacatcagagtagggagtgggtatcagtggctgtgtcatgctacagtaacaagcagatttctcaaagaactaacattagaactaccattccacccaacaatcccactactgggtgtatacccaaaggaagataaatcattttaccgaaaagacacctgcactcatatatttactgaagcactattcacaattgcaaagacatggaatcaactgaagtgccatcaatggtagactgcataaagaaaatgcggtacatatacagcaaggaatactatgcagccataaaaaagaacaaaatcatgtcccttgcagcaacatggatgcagctagaggtcattatcctaagcaaattaacacagaaacagaaagcccaatactgcatgttctcacttataagtgagagctaaacatggggtatacatggacataaagaagggaacaatgaacactgcagatcccaaaaagggagaggcagggaggggggcaaggtttgaaaaactacctatagggtacaatgttcactatttgggtgagggaatcaatggaagcccatacctcagcatcatctaatataccatgtaacaaatctgcacatggacctccctaatctaaaattgaaggaaaaaaaaggccaggtgcggtggttcatgcccgtaatcccagcaatttgggaggccaaggtgggtggatcatctgaggtcgggagttcgagatcagcctggctgacatggtgaaaccccatctactaaaaatacaaaaacaagccgggcgtggtgatatgtgcctgtaatcccagctactctggaggctgaggcaggagaatggcttgaacccagcaggtggaggttgcagtgtgccggaatcgcaccattgtactccacccgtggcgacagggtgagactctgtctcaaaaaaacaacaacaaaaaatcagctccaaaatcatcagagacttgctcaccctacatatccaccaccatgggtcagctggggactcagctcatcattgtccctctaagatgctggctgacgggatggccgccacctgaaacactgccagtcatcaagccaaagggaaacatactctggagggaactgcactggcaattaaatgctccagtatgaagggaatgccctcactcccacacacgatccattagccaacaccagtactggccacacccccgagccacagggtcaatggaaactaaccttatgccagaagagggacaatgggaactagctggtgaataccagtaatgaccaccacaggaacttcaaacgaagatacactttcgttcgcttgttttaaaagttctttattatccctagattatattttctctattgtgtttctgcactctcccttgatcaaataattctgtcatttcgtctgtctactttcagattcatggacattacacttaagacatgactaacgaaaagcctctcttcagataatgataagttaggattgtttgtgccaatagcccaaggcaaggaatttctcatattacttgtttgttctccctttcaacacttcgtatttctgggttttcttcactgttttttctttccacccttccatgctagtctcctgctcaatctcttaccttttatcgaaaaaaaaattactcaacattttattttttcacagctatttggtctaattggcaaaggattctgtggaatagcagaattctaactttgcagccgggcgcggtggctcacgccggtaaccccagcactttgggaggctgaggcgggcggatcatgatgtcaagagatcgagaccatcctggccaacatggtgaaaccccgtctctactaaaaatacaaaaaaattagctgggcatggtggcacgccctgtagtgccagctactcgggaggctgaggcaggagaatcacttgaacctgggaggtggaggttgcagtgagccgagattgcgcccctgcactccagcctggggagagagtgagactctgactcaaaaaaataaaataaaaataaaaataaaaattctaactttgctggtttcctaacccccaaattcagatgaatttgaattctgaaatacagtaacaggaattatcagcctgtctgattctaaattttgttggatcttcctcccaggaccgtggacagcccagccagctgtaaaggcctctaaaaagatctggaacagatccccaagaggtatctcaccaaatgagtccattccactacaatggccagaatcttcagttttacacccttgctcatgcccaccgctcacccggagtccagacccaagcaccatgctgcgtagttcctaatacggcaaaactatccagcatttttggtgaaattggctggaatgcttcacttagtccgtttttcactgttagcaggagaaccaccctagtatctttcatagaacagatccgaatgacaaacaccatcgtgccctcggagggctgagcttgtgttactgggtctggtcctacaaaccctgaaaatcctgaatctctcaagcaaagagattccccagggccagctctggcccttaacaggcaccccttaacgccaagctgcgaatctggctaggacctctatattttagccaagaacaccttgaaatgtacagtcctaccaaaggaactaatacaaatccagaagcacaaggctaaagaaaaaaaaaaaaaaaaccccaatgcccattgttgaaagccaattgcggggtgagtggggtgataaggctagcccacagcggatttaggcgacgtggggagatgccaaagtgaatacacggtgacttctaaatctagacgtctggaaggggccatgagagccagacaactgggcccgaaccccgcccgggagccagggtttgcaaggggctaaaccggctggggagcctccctctcgcgggtccagcctcggcggcccgggacgccggtaggcggggcctgagcctcgccccgcccccgctgcccgccattcgggtcacctgacccacccgcggctcacgtgatccgtccccagcgccgccattttggagctccggatgaggagggggaaaccgggggaaaagagggaaaagagccgggagagaggtgggcaaggacgagggcgagggcacggccgggtcctggctggccaaacgaggctcgcggaagcagcagccgccgcctgaccgcaggtaccgcgccccggggccgcccctccgcccgctgttagcgccgccgccggccatgtgcatcctcccctcaggcctctgccggcgctcgcttcctcctcagccggccgacccccgcccggtgctagccacaagccccaagttccgtgtcccggttctgtcttctgtgcagcaaggcctgcggagactctgggcttgccctgcagctgggggtggggggaacttgctgctccctgcatactgtcaccagcccggcccgcccgcaggcgttgcttccttctccaggcgttgcttctttctgcaaatgtgagatcgcttaggccagccgggatggacccagccacgatgttctcacagcatcttttgattaattttctaagctccctcattcccgacccatcacctcagtcctttagccagtgcgtggtgtagaaaaagctactacagaaacgcagccctggtcttctgcatttattaccatcctctggagatagaatgatgtctccagagatcacggagaccatcagggaaagttcccacctcttaagacctgggggcatcggaatgaatggtttgtgtagaaggccgggatgattaataaggtggcggccactttcccaaccccaaggcggtatttttaagtttctgcagtgggctgtaatttgctatcagtctgcatcgctcttctcaggcaattactggatttatcacctctttgagtttgcactttctccagtactcccctctcactcagagtatgggttgcattattgattaaaagaaagcctggcccttcattcctttacctcactaactcgttgaaaattaacttcaggggagccctaaagatgttttttctgccctggcagtgagctattttacttaaccgtaatcgataaggtagttgcattctaggtgaaacgaataagcatttttttatcttttagatttattccagccagtataagaaacagtggcaaagaaatgtaggaccagagtaggaaactgcgttagaagatatataggtcacaccactgtgtcatatctttttatgctgtttttctgcctattgtgcttggttgcagaatcactcgttagattgtatttttagtttagattaaaatagcaatgtgcaatttattgttccattctcattagaaaatgttgtcagtaaaaccaatagtgttgagtccagtacctaaattctgaggtaaaacaaaatacacaattattgggagaagtttccagagctattttttcctaacttctgcaaaatcctcaagtcggcttgttagataaattatttaaatttgcattacgtaatagggttgcatgaacattcctctgaatttctttttacatggaatattgagaaatttttcactgccaaaaaaaaaatcattactttgtttcaccaagaaagagaaatgttttgatactatatactttcgttcttggccacagctggattttgaagattgatccaagggactgtattaatttcaggaattgatttgaaagacactggctctgccacttaacagccatgtaaccttgggtaagtcacttaaaccacactgagtgtttccttatttataagactgtataacacccacctagcctgtcctaaagagttatgaggatcagataccactaacatgtttgatagagcctagctgtaaggagctgttactcttttcagtattgatattttgtacatttttattctcattgagaattaagatgaaaattggtgtattagagaaagcatggttttagagtgagattggcctggattcctgttcttaaaccagttaccactttgtgtctgtgagtctcaggtttctcatctgcaaaaaaaaaaaaaatacacaaaatttgaatattacacaaaatctacagaggcattactccctagacttgcacctcatgggcaaggatttcctcagtcatttttgtagtccccagcattctggttggcacattataggtgctcaataaatgacagtaaatctgaatattggttaatgttagttagaccttatgtcttcattgcagctgccaaattagaatattctctcaggctatgtgccaactaagaaactctagactatgaaactccatatacttgtgatatttatactcatttttttcttagtggtaattaataattaccttgggctcagaagattttaaatcaaataaattgtagccaatatagtgaggtaaatctataaataatgtgtaagcagtttccaggtaactttatagacagtttataattcagggacctgaaagttcatctagcttcaccctcttgttttacatctgagcaatctaaaactcacagagacagtgacttgcctaaggtcacacagctaattgagggcactttaggggagggacccttgagcttatgtcccctgccttcttttggctggagcaaaataaatttgtcatattttagaattacaataatctggaagaatggggaatttattggccattacttttatagcacaatttttttttttttcccattttggaaaaaacaaattcttgttctgaaagagaaggttcttttgtatcatattgtacttttcttcatataaacacagaaaattacagccttttctccaggcccacatgaattgttcaacttgattttactcatgatgaccatactactgtaattataaagaactaattagatacccaaataaccaaatagcaaattataaggaaataaagacaactgaaataatttggctcctaactttttgtgagaaagatattaattagaagcatttgcctgtggaatactgttgtcaaggaaagatttgagagagttggtggaaagggttatagaacttttctggtttgggatacaacttttgtttattacttatttattggtaacaatttaatatatttaatgttgttatgtctaaacattacaaacaagaaatctcctgttttgctaatgcctgtcgtcttctttcctcctggtgaactttcctattcagccatatcgatcttttcactcacccccagatagcatgcttattcttacttctaaaaatatagtcatgtcatggctgcttttctggtcactgctacccttgtgtcaacttgtatcagcagtattccaaggaagcaaatggcacgttgaaatgaggataattcaaggaaggtatatttacaaagatattagtaataaaggtgttggacttcaataagcaaaccacagcataatgcagttatctggagctagcagcattaggagagggagaggcatcagaatcagaagaagggtcttggagagcagcctacctggaaagaaatagccttctattgaggaacacagccaatccaaggtgacctagaggtagagaaccaggacgatgaatattctgatctcactctgctacctccctctgatctgtcatggttcttcattggctgacctcaaccagaaggcagaggacaggggagcctagtgatgtaatccctctgacagagagcagaatggaaaggaggatacagtgagcctagagggcaaatggatgatgtctggcatgctgcccatcctttgggaaccagtggacatcttacctctccatgaagcttttgcttaccttgctagcccaaaagagctcttcagtatctttcaggatttagtcattgactgttgccttttattttaccttgtgtaccattgcgttgtttaaatgctgttactttttaacttccaaatgtttgccttatccactcaactcagttttaaactgcaagtattaagaatttaaaatttttcctgatactttgccttgcgccttgcacataacaatttgtttgttacacacacacacatatttgtatttctgcattagtggtctaaataaaatttctgtgattttaaggaatcaagaaagttgaaggattggccttaaggtaacttcccctctgtgtatactttattatgatctgtttagcctttttattatgaaaaatgttaaacatttacataagtagaaagaacagtgaattcctaggtactcatcatgcaacttcaattacagaattagtcattctttctttattctcatcctatccaccccaccactgcagtatcaccaaggtaattgttttaaagctgtgcttacactgatctcttggaggccaaggagagtatgcagattgtcatagtttatgttgtcatcactattgagccactgacattgtatgtatactccttatttcatctcttttgttcagatttgcttcacttgacacacaatctcatatatatgtatttctgcattagtggtctaagtaacatttttgtgaaaattgaaagagttggccttacagtaacttcccctctgtgtatactttattatcagctgtttatctaaccttttttttttttttttaacagagacttgtttttatgagattaacctgtgcattgattttgcatggggacccaaactggtttttcaggtgtttcctgacgtatttcatgttgtcatatctgttttatagctgccattactgtacttatccccaaatgtatgcagcctttaaaatgagatacttacataaatgttcagggaaaattggagcatctgctgcaaatttccattagctcttaatgcctgagccgacacagctttaaaaatctgaatgttttgtcagattcttttgtattagtctttttcttgagttaagatgaactcctccttctcttcatttcactttctttttaaggtacacactgaaatatccacagggagcaatttgcactggtctgtgtcacttctcttattaagtagaagaaagataacatgagtcacctttgtaaccctacgggtgtgcaaagtctcttgagcaaacattcacttgttaacctccagatgatcagtcagcctacatgggtgttacatttcatggggaaggagaccttagatctacagcagagagccgtatcgtgttcaggaggattcctattattaaacttattatttaatcaatttgcatttaaccattgaactgacagacataaggccttaagttaatcaccttaaagggaaatcagtagtcacatgaagagccacagctcctcttggcctaaaaatgtggaattctaagacaataaagtgacttaggaagtcacaaaagggtttttctaaggaaacaaattgttcccccattggtctcctctttaatgacttacagctgagcgtagagatctaaaaagacttttgttccttctacctgagaaagatgaaacagaactagtcttttgagagattgtttaagggagagtggctgaaggaccacgggcctttgggagccagggtagctgtcattgttggaatggccatggaatgcatgtgagggcagttagagacagctagtagccaagagaaaaaaagctgatgccatagggcagagtattattaggaagaagggaagaaatagtactgaagaagccaagagtaaagtgtttgcatttttgcctgatgtggacctagatctagaaagctggcttgccagaaggagtagaaaatcaggaagaaaagccatagctgctgcccagagttgtgggcgacctggcactgaagctggtcagctgtgtgtgtgtgtgtgtgtgtgtgtgtgtgtgtgtgtgtgtgtgtgtgtgtggcgtgggggggcggggcctgtttttgtgtttgtgtatatgtgtgtgtgtgtggcgtgggggcgggcggggcctggcaggacattaggtatcatcttggcaggggctgaagggcccttatatgttgattcaaccatgcggggaagaacagccatgattcaccacctaaaataagaattcagagcctgggactgaagtttaagaatagtgtggtctttggtctatagctagtgccactaaaaattttgttggcatttattgaatgttgtgagtaagattccagaatgcacctaaaatgtggaaaaacaaaacttgttgctggaaaaaagcctaaacttaaaaatgtgatccaagtcaacaaattaatctcactttaagccaaaggaaatgtttgaaatgaaagtactgccaggaaatagaaagagtattctagacttaggcagaaagatttatgggtattttatgtttagtgacttcctcagccataatgcattattagaacgaacaaataacctcttctaaggactctgttcatatctggaactgaaacacaactgggatatcaattttttccttctctgatgtcccttaccctttcagggaaaaaaaaaaaaaccatatatgtggatatgagtaatagttgaccactaatatgacctctaaaaaaaaaccacagcatagtttgtggtttatcttcaggaagataaaggaagtaaaagtaggaactagattattgcttttatttaatttcatttatatagtactttcccaaattcaatatgccctgtacaaactacatgactatagtttcacaatttcaaagatttggggagaaaaaaaacaaatttgtgattttagtaataaaactgcagctatatttggtataagaaatactctcaagaattgtatcagtcattggctttacagagtgatgtttcacagtaactggaggggtttcacatgccttgagaatggctgtgctcctttaatcaaggaataggagtctttttttttttttcttggcattgtgcaaaagggagggagtacttttggtcctgctggatgctgaaggcaaagaaagtgaagaaaaatggagaaaaagatcatcatttccgaagaaataagtgatagaggggagtatcttcatcattagtcttgatagaagattgcattgtaaagagaaattctaaccaatttaaatctatactggggatcgccgggtgtgtggacatggagcttccagcttagaaaatacttagatgagattacagacactaacattctcttatattttccaaattacatgcctgtaattatcctgtaacctggtatttttctgttttacattatcctttttagatatggaagaaagtagcagtgttgccatgttggtgccagatattggggaacaggaagctatactgactgctgaaagtatcatcagtccttcattggaaattgatgaacaaagaaaaactaaaccagatccattaatccatgttatccagaagttaagcaagatagtggaaaatgaaaagtcacaaaaatgtcttttaattgggaagaaacgcccacgttcaagtgctgcaacacactctcttgaaacccaagaactttgtgagattccggctaaagtaatccagtcacctgctgctgatactagaagggctgagatgtcacaaacaaattttacccctgacactcttgcccagaatgaagggaaggctatgtcttatcagtgtagcctttgtaagtttctatcatcatccttttccgtgttaaaagatcatattaagcaacatggtcagcaaaatgaagtgatactgatgtgctcagagtgccatattacatctagaagccaggaggaacttgaagcccacgtggtgaatgaccatgacaatgatgccaatatccacacccaatccaaagcccaacagtgcgtaagcccctccagctctttgtgtcggaaaaccacagaaagaaatgaaaccattccagatatcccagtaagtgtggacaatctacagactcatactgtccaaactgcatctgtggcagaaatgggtaggaggaaatggtatgcatacgaacagtacggcatgtatcgatgcttgttttgtagttatacttgtggccagcagagaatgttgaaaacacacgcttggaaacatgctggggaggttgattgctcctatccaatctttgaaaatgaaaatgaacccctaggcctgctggattcttcagcagctgctgcgcctggtggggtcgatgcagtcgtcattgctattggagagagtgaactgagtatccacaatgggccatcagtgcaagtgcagatttgcagctcagaacagttatcatcttcatctcctttagaacagagtgcagaaagaggagtacacctaagtcagtcagttaccctggaccccaatgaggaagaaatgctagaagtgatttctgatgcagaggagaatctgattcctgatagcctgcttacatcagcacagaaaatcatcagcagcagccccaataaaaaagggcatgttaacgtgatagtggagcgattgccaagtgctgaagaaaccctttcacagaagcgcttcctcatgaacactgaaatggaagaagggaaggacctgagcctgacagaagctcagattgggcgcgaaggaatggatgatgtttatcgtgctgataaatgtactgttgatattgggggattgatcataggctggagcagttcagagaaaaaagacgagttaatgaataaaggcctggctactgatgagaatgccccaccaggccggagaaggacaaattctgagtctcttcgattacactcattagctgcagaagcccttgtcacaatgcctataagagctgcagagttgacaagagccaacctggggcactatggagatataaaccttttagatccagatactagtcaaaggcaagtagatagtacattggcagcgtactcaaaaatgatgtcgccacttaaaaactcttcagatggattaactagtcttaaccaaagcaactccaccttggtagcactcccagagggtaggcaggaattgtcagatgggcaggttaagacaggcatcagcatgtccttactcaccgtcattgaaaaattgagagaaaggacagaccaaaacgcttcagacgatgacattttgaaagagttgcaggacaacgcccagtgccaacccaacagcgatacaagtttgtccggaaacaatgtggtggaatacatcccgaatgctgaacgaccctaccgttgccgcctgtgtcactacacaagtggcaacaagggctacatcaagcagcacttacgagtccatcgacagagacagccttatcagtgtcctatctgcgagcacatagcggacaacagcaaagatttggagagtcacatgatccaccactgtaagacaagaatataccagtgcaagcagtgtgaagaatccttccattataaggtaagcattggttcaggaagtctttcagaggaccttcgcatcttagagtgagaagggaactttgtagatctaatccaatcacctcattttatagataaggaaactgggtcccagaaaagtttgataagttgcccaaggggatcccaacttaccagtattaaagttgggactgttcagaatttctgctgtagaatccttttccctgcctgctgcctccttgacagcctctgtgttttagtgtgtatagtttaaagtgttgattttctgttgcaagagaattgtagggagtgtatagtggattgacatacgtttgacttaacgtattgacatacgtttgacttaaacaaatttaaccgtacatcatcacaacaaaaaaatacatatttttcatcttatatggccccagaatgccaggcattcagttcagcttctacataaccaacagtgatgtgtatcattgcagaaggaaaaatgggctatggcggacctattaaaaggtactgtcatggaaatagagccatgtgtgtcatgttttatgggcagggtaaagaactttcaagagttattttgactgtctgatttttatcttaagtgctgaccttatcaaaaccaatatcctgtatgaagtgctattcttttataaaggaaacgttgaatcattggtttagaacttttcttcagtgggccaggtgactccttgaaaatgtattacaaatgttatcctaagggctaactaggaggtagactttttccctcagattaccgagagctggggtctagctgtggtaaaaaggtcacaggagggaggccgaggcgggcagatcatgaggtcaggagattgagaccatcctggctaacactgtgaaaccctgtctgctaaaaatacaaaaacttagctgggtatggtggtgggcacctgtagtcccagctactcgggaggctaaggaaggagaatggcctgaacctgggaggcggagcttgcagtgagccaagatcatgccgctgcactccagcctgggcaacagagcgagactccatctcaaaaaaaaaggtaacaggaataagaaagcccttgagtctgaggttcactgcttctcagattacactcatgaaattccaagtaggatgtccacataggctgcaaagacaagttcctgaagtctccaggagtttcttttgctactgagctcttgattcatgggaatggaagtagaggagacaggatgtccttggaggagcacttccagttagatctcttacacatttagatatttcaatgaaaaattaggagtctggtgattactgattggatttttttttgtgaagttgcattattctgaacactctgctcgttcctcctctgggcctaccagtgtttcagtaaatacggacacgccctgtgtaatcacctaagaaaatggtgacttcctttcagagaatatgaagaggaactgtccgttgaatgtgattatgatttgctaatgtacttctttctataaattgtcaaatgtgtcaaatgatcctttagcagacttgattttaaaatatggtaattcgttgtactaggccatgaaagcaatgaacctgttcttctacagcctcctaagagttggacatgtatatttattgaaaattacatatttctttccactttttagagtcaattgaggaaccatgagagagaacagcacagtcttccagataccttgtcaatagcaacttctaatgagccaagaatttccagtgatacagctgatggaaaatgtgtccaggaaggtatctatgtattttgttatgcaggctgcagtgacttgcacatgacataaaagtgcccttagttgtcatggttggttattttcagggcaaaagcctatattctcctccatttttgtaccatggatgtgagtgaatctgatctctgtttctgaggaaatgccaagtactgaatgaagcagatgattactaggtcctaggtgagaagccctagatagtaaggattcatcttcagttgaaacttaagagccccttagaaggtgatgtaccagcaagccagaaaagcaagccagaaaagctacaacatggaaaacaggcctcccctccctctctcggcaccagttgacctactgagaacagagcttttgcagatggtaggcccccaccccaaactttaactggggctccccgctgtgatcttattcttacccaagtatgactgccagatttcatctgcattattaaaaaaaaaaaagcacacacacagacacacaagatctttttatgtactagttaagtagcagtcaaccgagtttctggtaataagaatattagaatcaaaagatttaattagagctccatgaaaaggcggatgccacatccggagaattaaggataaagtgtactaagctgtgccgctttggttcagctcacttaaattgatatactttaaatgtctccagtgtggcacataatgtttatgggagataagacatattggggtgactttcccttttagatttgctaagaattaaagttagaaacgactacagagtgaaatgttttaccataatgtttcattaaattataccccagaaagcataactgattctagaatgcttctgaaagaactgattttgacaccactgtagcaccaaaattctcatgtcaaacagatgtcatccctgtaaaactctctgaaacaaaaggagtttatgatatagcatctgtttttgcagtagatggctgagctaaaacagttttgtttcctttttacaaaatagccctaaatgcctccttttattttaattcattatgtttccatatcccctttaaaggagacattaaaacgtctgatatgattggaccataaatccctaatgaaaggatgaagtaaatactactcagtagcaccacctgcagttaatatcagtgttggaagatgtcttttttagcaccgtcctaaaaagcaaacatttcaaactgtccaaatgagttaacattaaaattcacaattttaataaaaagattaaagtgtcagctcaaaattaaaataaccacttcagactttacagtattaatgaatgtttactagattttatgttgcagcatcttttctttgtggctcatgctttttttttagggttacatgcatggatttttaaattgcctgccatgcctcttttcctccacctggctccatttgcttttttctctcagtactgtagcagttcaaatggctgcatacttatacctggatgggtactttattaactcaatattagatattttgaaatctggttgtcaggccaaagaaaaaatttttagctcacaaataaggtaataataattcatgctttgttaaaacttctttacctatttagtaaacttgttaaacaagaagagagatttgtgcctctgtgatcctcagtctctgccattcagatagcacagataccttagggcatgtttcagcttaacatttgcttggccaaaaggcatggcctgcctgtcttgagctagatactgtgttaggtgctgggagtacagtgaaaggcatcactgcccttcaggaatccaactcagtgaagaagacagaacgaggctgatgggtatgtcagcagataccgcaggagctcaaatagagccgcaagcaaagccctttcgtatggtgttactccatgaaacctaattaaattgttttttattggaaacctataatttgccaagcgctggggattcagtctaaacaaaacaagcagatccttatcctcagggaatagacagcttagtggcagggcagagattttacccagacatgcaggtaaagtacagactttgctaaaggaaaaatataggacttactaaactatgctgtgaggttctagcatttccaatttgtagatgagaaaactgagacttcaagaggcaaaataatttacccatgatcatactggtagaaagtggcagagcgaggactaagcccaagtttttgaactttaaatccaatattctttccattggaaacagttgcttgaagtagcacaggctctcattctgtgctatattaagtttttccatctgtcagttttattagttgtcattgatctgtaatatttctcacacaaaaccattatccaatatttcacacttcattttttagggtttttttaaaactgtatttggaacagtgccatttataatcaagtccaagtttttaacctaccaattaagagcaatacttagattataattatgattagtgtgtatattaacgttatagatttataccaggaaattaggacattttgttctgcttggcagtagttattagcaaaagaaaatttcaattttagaaaccgtaaatttaacttaaggattttctttgttgaaatttcagtgtgggttttcctttgtataataccacggattttacttttatgcggtgtatacaggtgttctacctaagctttcttcctgccaagagacacacagttcttcctgctctgcctttttcatgagcttccatgcttgctttgtttctgaatataaagcagagtgtgaatagcctgtggactgtatgctgacagacaagtacatgaagcgttgaatatcttcaagaaatcgttttatatgatcaagtcactcaactcgtgttgacataagcttaccccaacttgaattactcagccctgttgttgcagagtgagtttagtaacatggctacttttcgttggatccatgtctcctgcgtttcggagagctgcatattcatgtcagtcataacctttgtccctgtaacctgtcagttaactagaaagaattatacattgcatagcacttaaaaatttgcggccgcttttcctttcttgttgcgttggtagctgacgtttagtggtaaacaaagaaaatgcactgggtgaaaaggccttaggctttttttttgtagggtgagagtgggggagagatctcttgctctgttgcccaggctggtctccagctcctggcctccggcagtcctcccacctcagcctcccagagtactaggattatgggcatgagccaccacacctagccaggctttttatattgagttggttatatatgcttcatagccacactttataatattggagtatagtattaaattacagcttgttgtcaagtcagtgtttctgtaagacagtatatccaatattggttagagtaacacctatttggtgatacagatcaacagggtgtctctgattaatttagctcctacatagccagaagcaagttcattatgacttagaatattgtacatggttatgcaggaatcatcccaacctatctgtgtttataggtcagatgatgttcagtttatatctgctgatagtgtatatgcaggaaaacctataaaaccacttcagacttgttaaaacagtgagaaagccgtgattgaaatattaatacaactgtgtggtataaattttcatttacaatggaatgtaaatgctgtcatttgaatcttgtcaaagcctgctactaaaactctgaaataccttgtctagggaataagtcttcagtccagaaacaatatagatgtgatgtgtgtgattatacaagtacaacatatgttggtgtcagaaaccacaggcgaatccataactctgataagccgtacaggtaagtgttatgattctagaattttaatgtttgtattaaaatattttatattaaagaaataaaatgaaataaaaatgtatagcacttactgaaacacaggttaagaagtaagaaattttcactaattggttttatattttgttgttttatatatttacttatttattttttgagtcagtgtcttgctgtattgcccaggctggagtgcagtggtatgatcacagctcactgcagcctcgaactcctggcctcaagggatcctcccacatcagcctcccaaagtgctgggattgcaggcgtgagccactgcacctggctggtattatgtcttgtttgatttgttaagatgtgaactttaagcttgaatcttaggacagtaggcattttgtctagttgatacataggaaattgtctttatctgtcaattttatgttttcatttcatatgggtataaatttcatagcaattttcaatgccttagagttcatttcagtaatttggcagtaaggtactcagtattcagcaaaagatccttaaaacttaaaggcaataaaattttctatgaaagagtccatttttcaaaattaagctagtatgtgtagaataagtcatttaatttcattacttgatttttcccaaaagcaaattcagatatatatttcagaaaatataggcattctcagtgatagtgctaggcaatgcgcatgaactttcacccccttgtcaaaacttagcaggtttaactctctccccagattctgtagatatgatacaagtgagtgtgggaaagttattgtattaatctcaatgaaaacctgacagattgtgccataaaaggtcattgtttaatcccaaagtgtggtgatctgtgtatggtttcgaatatttaatatgtgcttaatttgcaaaccagcagacttacttataatcactcttcagaaagtacatctgtttgcagagtcttaaaactctgtggaaggtgtttgaccttgcctcagtcctcctcagtgtcttccttccttccttctttccttccttccttcttttcttccttccttcctttccttccttcctttccttcctttccttccttcctttcctttcttcctttccttcctttcctttccttcctttccttttcttccctccctccctctctccctccctccttccttcctttccttccttcgtttccttccttcctttcctttcttcctttcctttcttcctttccttccttcctttccttcctttcctttccctcccctccctccctccctccctccttccttccttccttccttcctttttttctttgacagagtctcgctctgtcatcacccaggctggagtgcagtggagtgatctcacctcacggcaacctccgcctcccgggttcaagtgattctcatgcctcagcctcccaagtagctgggaccacaggcatgtgccatgattagctaattagagacggggtttcgccaggtcttgaactcctggcctcaagtgtccgcccaccttggcctcccaaagtgctgggattacatggttacaccatgtccaatcagtctatttaataggtgggactgagtatatttacattcgtgatttatactgggaaatgtttaggagaatgtgatggaaacagggaacactagtttacctgataggaggagaaagctttgcctttatatttttggtatccttgaatttagacataccgtgccagattcatgtgatttaagtaagaagaaaataacatttctccgggtccagaattagattgttctttcattcatggagaaatatttattgagcaaatattatgcttcaggggccgtgctagattcttggactacagtcataacaaaacagacgtcatctttgctgtcatggaacttgtagacaaacaataagcaagtaaaccctcaaatacttaggaaaaaggttagcgattctagttctgttgaaggttttacatctgctttattagatcagtcttgcagcttaaagattcattttgatagctgtcagtgtctcagggatgttttcttgtgttcttaaaatattcacagattcataggattcattgcagttgtcctagggtcttcctaccaacgggcaacatcccgtgagcatcctctttgtgtaacatcagagaactctcagtctgttattttccaaatttattcacactccactttgtcactgggtttggtgtggttatgccttagatacagttttgtcatatctccctctttgtacttattatcagtttttcctcataagtcttattttctaatgtcatggctctccttttaactttctttaaatactcaccatcctttgccttcatgggatttctggtcgcagagcattacggattaacatgttctattccaggatgtttctaggactttctcctcgttgtcctatactgtgtgctttaagcggagctggtagcgtagcctttataatgtctgacttaattcaaggatcacaggagtttctctggctcatttcatgtctgcttcattcagtttcgttgcctggtgcacttatggtcagagtttgggcttggtttctcagagttcatgccatatcctatgcatttctgattccctacattttgttaagaaacatgctcacaggcagcagtaatgagttcttaaagagctacaaggccttgttgcacaacttctaaactttgcacaagggcacaaaagatttattgtttattttagtgtgcctattacataacaagttttctgtagtggtgaaacctgttcctttctcgtgcttttgctttttatgctgtcattccagtccttcaatgaccccatccttgtggtctgggcagtacggcttcatggatccctggttctgggggcagatagtcctgggattgaatctgagctctcccacttgtgagatttgtgatcttgcgcaaactgtttcacctctctgtgctgcttttgtcgttaatagaatgaggatattaaggttgtgagggtgaaataaaatacctaaggtaccagcacataataaacagccagtaagtggtagctggtagttactgggcccagcttttatcttctcaataattcattatctaaccaaagaaaagtactaaaaggctgatgacctctaaacactagggaaacaaagaagaattaattctgtgccagggtaggcaggcagagctcattttacaaaagagatgctgggcccaggcagagtgctgtccctgctgaggtccccatgctatgtctggctgctctggagtcactctagtatcttgggagcatcacaggcctggaccacacagtttctgtgccccactggggaccttgggaatgttatgccatactaagcctcttttcccatacgaaactcgggagaatacttccccgctcataaggctttgtgaagattaggtgagattatatttatgaagtacccagcatgttacttggtgcattgaaggggcttgttcccattttctgctcatgaagttgtcagattatctcagaagccctgttcttacccagaaaaaaagagagctgttttccattcctgtggaaggacagggaaagattaaaatgacatcattctatcccagtgcctaccaatgcagctattaataactttgttcttactctgtgtaaaccatacaccaattatagttatacctgacatttctttttttttcttttttaaattttatttttccataagttgttgaggtacaggtggtgtttggttacatgagtaagttcttcagtggtaatttgtgagaacctggtgcatccatcacccgagcagtatacacagcaccatatttgttgtcttttatccctcgccctcctcccactctttccccccaagtccccaaagccattttatcattcttatgcctttgcgtcctcatagcttagctcccacgtatcagtgagaacatacgatgtttggttttccattcctgagttacttcacttagaataatagtctctaatctcatccaggtcactgcaaatgctgttaattcattcctttttatggctgagtagtattcaatcatatatatatatctccgagttctttatccactcgttgattgatgggcatttgggttggttccacgattttgctattgtgaattgtgctgctataaacttgcgcgtgcaagcatctttttccaataatgacttcttttcctgggattgctggatcaaatggtagttctacttttagttctttaaggaatctctacactgttccatagtggctgtactagtttgcattcccaccaaccgtgtagaagtgttccttatcgccacatccacaccaacatctactgtttattgattctttgattatggccattcttacaggagtaaggtggtatcacactgtggttttgatttgcatttccctgatcattagtgatgttgcatttgatttgcatttccctgatcgttaatgattttttcatatgtttgttggccatttgcgtatcttcttttgagaattgtctatttatgtccttagcccactttttgatgggattgattgtttttttcctactgatttgtttgagttcattgtagattctggatattagtcctttgtcagatgtatagattgtgaagattttcacccactctgggttgtctgtgtactctgctgactgttccttttgctttgccaaagctctttaattagatacagctatttatctttgtttttattgcaattgcttttggggttttggtcatgaaatccttgcctacgccagtgtctagaagggtttttccaatgttatcttctagaatttttgtagtttcaggtcttaggtttaagtccttaatccatcttgagttgatttttgtataaggtgagagattatacctgacatttataacattggccccaaagttttactgaaaagttccactcaaaatttttcatattagatggtccttggtttagttcaatattgcactgctggacctgccctgatttacatctcccagtaccacttttgtagagaacaagatgggagaacaaaacattgtcctaagagtatcagtttctttttaaccataaggcatggaacccattttcccttagaaatacaactgtactgtgcttaggttctgaaactgtactgtggcagggggacagcatgatgtcaagggaagtacatgggctttgggctcaagtactccacacactgcccgggacatagtaggtgctcggtaaatgttgactgatagttgtccatatccctcagttcttcccatctataaaatgggtctgattctataagctttttgtgtaagtttaatttgtgcttgaaaataaatgtgtagtggtattattacgccttttcttccttaagtagaatagctgcccaaataatataagatgaattttttttaatacccagtccaaaaatacccattttcccctaattgtttcaaaacatacttttggaggtagctttttcatattgagaaccaaacaaggtccagccgctctattaagagagtatcttaagtctctctctccctccctccctctaaattttttaaatagattttataattgatgttaccatgcctcctgaaaattgcataaatcataaaggtacagctgatgaataatcacaaattaaactcatgcttgtaacacaaaccattatgagctcttcagcagcaccccttcgtgggccttccagtcattacccacccctcccctctgtctggtatccactatcttgacttctaacattatcaattagtgttttctgtttctgaacttaataaaaatggaatcatacagtacatattctactttatgttcagatttttttgctcaacgtgtgtgtatgtgtgtgtctgtatagttccacctagcagaattgcatttcattgttacatagtattccactgttaagaccaccgcaatttattcattgttctgtgaatagacatttgagttattgtaaggttttcctccctgatatgatctgataccattttaacattcttttacatgtttttgggcacatatatgaaatgagtccatttccattgggtttatacctaggggtggaatttcttggtaattggacatgtatatgtattcagctttggtagacagtgtcaacagttttccaaaatggttgtacctattcacatcctcaccagcactttgtgttgtcagtctttaatctttattgttttggtagatgtatagcagtgtattactgtgcttttgtttgcatttccctgataatttctgagtttgagcatcttttcatttgtttatgggctattattgcccacttcttttttgcattgtctattgtattagtttggcattgttataagggaatacctgaggctgggtaatttataaagaagaggtttatttggcttatggttctgcaggctgtcctctgcttctggtgagggtctcaggaggcttccagtcatgacagaggtgaagcgggagcagatatgtcacattgtgagacatggagcaagagagaggggaggaggtacaggctcttcttaacagtcagatcttgcagtaacagacagagaactcattattcatgaatggctacaccaagccattcgtaagggatccatccccatgacccagtcgcctctgcccaggctttacctccaacattggggatcaaatttcgacatgagatttgaaaggacaaatatccaaactgtatcatcggctgttttcttactgatttgcaggagctcttcatgtattctgagtacaaggcctttgtggggcgtattgcagatgtcatctaactgtggcttgcctttctactttcttaatgatgtcttttgatgaacagacatttccagtttaatatagtcaaatgtattaatctttttctttgtgtttaggacttttgtgttcttatattctgaaactagttttgattttttgaaatagtctgttgagtaaggtagacgatgatacagaaataaaaatgtgtgctgattttcagggatggcacatcaactatgcgtgcttaggtattactgagcctcatttactaatatggcactaaagctaaaaaaatctaaacagaaaacattccagaaaggctttcagcagggggaatgacagtttggaatggaaatgataaggttgtctctcagtgtagtcagttattgtatgggatttgtataaatagaagtatattagaaatgatgataatagctgatatttttgagaagattgtttgtgggccagacccggtgtgctaagcattcaatacgtgtcagttcagtcctcacagcagcccagtacttaggaatattactaccccaattttgtagacatggaaacagaggctgggctagcttaaataactttccccatgtctcagagccggggcctgaactcttgctcctaataactgtgtcatcctgcctgtctgtgctacaccagggagatctctttatgaagtgtactgctgctgcatgccagcagcccacaccaaatcagggtgtgaaacagaagcaatttcattatgctcagggattctgtgggtcggtcaggaatttggaaaggacgcagtagagatggcttgtcccatacagtctggggtctcatcagggaaggcttgaaggctggaagtgacccagacagctagggtgacagtcctctgaatgctgcctcagcataggctggtggctgtgctggctgttggttgggcatcagctggaacacatacatgatttctccttgtggactttgcaggtctgctagtccccaaaatgagcttcttagataagaagtaggcaaaagctctgttgccttttatgacctaaccttggcagtcacagcccatcacttccaccagagttacaggcttcagtcttttttcatctgtaggcatcgtgattctttagtcaatgtgttggcttagggaaaaacttaagtctttagaaagcttcaatttgtttaaggaaaatagtgaaggagatagttttatcaggaggaaaaaatatatattttgttttgaagagatgaactgaaagagtttgtttttctcagtggcataaagatctctcaggttcatcacaaaatttgaagtggctgttttgtgggggccttagttatttctttaaaagcatagaaaatgaattgaaggtcataagataagctctattgcaaaatttctattgaaatcgttgtttatgtgttcaaaccagactcaggtcaccccaaatcttgtaggacatccatctgcttttttccatctaagccctcaaggcagttgacctggaaactaaccttggtcccaggccaggaaagtggggggttttaaaccaacatccttatctccttggggttctgagaccgaagtaactgacttagtaacagttggagagtctgtagaaaaattcagtctcaggctttttagccaagttataagaagccttgggtttctacattggctttctttgggttgccaaagtagcttctttgcattgggaagaaatcattttttatacagatacaggttgggtgttattggttaacatagaaattgtgctgctttggacattccaaagcctggatctagcaatggccatatttacaggccactctaggagtccagcaatcacactgttagggtgttcacttctttccccatgtcatgtgtatgactttgccttggtagacttgaataattgagtcccaaatggctctgtcatcaggagcatccagcaattccaccaaggaagcaaagcagaatcgtgacaggtggtgtcatgatcagtgtgctcttttgtcatgtggtttcgttttggtttaagactttttttggccaatggatgggttgggataggaaggagcagtttaccctacgtggaaatatgattgttgctggtctgttggtgaggtggttagaaatgatttgttagacatagcctctgtttcaaaacatactttcttttttttttgttttgttttttaatacatgttattgtatatattggaggttaacaatatgatgtataagatgtagatagtaaaatggttactatagtgaagcaaatcagcatatctatcatcttacgtacttttttgtggcaaaagcagttaaaatctacttatttaacaaaaattcctaatacagcacattttgattacagtcctcatgctgtgtattaggtctctagacaagttcatcctatatacctgctgctttgtatgccggaatcttctctccctccccacccccagcccctggtaaccactccttccttctctgtgtgtgtgtgtattggatttttaagtaagattgaacaatatttgtctttctgtgtctggcttgttagcatgaggcctccagggccatccatgttgtggcaaaaggcaggctctccctttttaaggcggaatgattgagtatgtgtgtgtgcgtgcatacgtgtgtgcgcacgcgcgtgcacgtcacgttttctttatccgtttgtccgtcagtggacacttaggttgtttccataccttggtttttgtgaggaatgctgcactgaacatggaaaggcagatacctggtgaggtggcgatctcatctcctacacagaagagggatttctgggtcgtgtggtagttctgtttttaatttctttaggaacctccatactatttttcatggccgtaccaatctacattgtcaccaacagtgtagtaggatttccttttccctacacctttgccaacatttattctctcttttgtctttgataatagtcatcctaacaggttatcatttcctagtggttttaatttgtgtttccctgatgattagtgatgttgagcacgttttcatatcactgttgcagtttttatgtctttggagaaatatctgttcaggtcctttgcccattttttaatcgagttatttgtccttctgctattgagttataagtgttctttataaattttggatattaaccccttatcggatatgtggtttgcagatattttttttgcagtctttaggttactctttcattttgttgattgttttctttgctgtgcagaagttttttggtttgatgttgtcccatttatttatttgtgcttttgtagcctgagcttttggtatcataaccaaaaaatcattgccactgcagcgagatttttccttgtattctcttctaggaatttgatggtttctgatattccattcagctattttacccattttgagttgattgctgtggatgatgtaagatatgggtccagtttaatccttttgcatgtggatatccagtattcccagcaccatttattgaagagactgttctttctccattatgtcctcttggtgcccttgtcaaatattcattgactgtgtatttttagatttatttctgggccatttattctgttccatggatctgcacttctgtttttatgcccttaccatactgtcaaaacatattttctatcatttctcctttttctgggtactacatgtacagatcagagccttaaaaatggctgtgcccagccgggcgcggtggctcacgcttgtaatcccagcactttgggaggctgaggcgggtggatcacctgaggccgatagttcgagaccaggctgaccaacatggagaaatcctgtctctactaaaaatacaaaattagccaggtatggtagtgcattcctgtaatcccagctacttgggaggctgaggcaggagaatcacctgaacctgggagggggaggttgcagtcagccaagatcaattgcaccattgcactccagcctgggcaacaaaagcgaaactcccatctcaaaaaaaaaaaaaaaatgactgtgcccgtcagcccaggaacgttcttatctctggaaaggaaggggaggcaattgaggtgaggcacacagggagtctcaaaggtatattggtaatgttctgtgtctcaactaggagtgttaattgtttattattattattattattttttttttttttgagatggagtctcgctctgtcgcccaggctggagtgcagtggcgtgatttcggctcactgcaagctctgcctcccaggttcacgccattctcctgcctcagcctcccaagtagctgggattacaggcgcccgctaccatacctggctaattttttatatttttagtagagacggggtttcaccgtgttagccaggatggtctcaatctcctgacctcgtgaaccgcctgcctcggcctcacaaagtgctgggattacaggcatgagccaccacgcccagtccattctttattattcttaaggagtcttgcgggggaaatgaactctatcctaaaaaataatctgcagtgcatttatattgatgtgcaagataatttgttatagcattgtttataatgtcaaaaagatcaaaaacattctagctctatgctacttagtagagtgtattttcataggatggaacattataccccattgaaaatgcataatttttaacttgagaaaatactcatggaacattgtcaaaagtaggattaaaaatctatagtatgattctacttttgcttcagatctacatatgtacattaaaaaagaccaggaagctatgcaagtaattttttagaatttgtctttatacttgcctatattccatttttgtgcaaggaatatagattatataatcagaaaagggtttaaataaagagagagcgtttgctgaccagttgagtggacaggaattggctcagtaatttaaactaacaatccataagcaaggggctctgatagcatggcaaaccagatcacccacaacgctccacatgaagaaaaggcgtttttttcagctgtcagttctgcaggccgaaaagtttgagggcctggccctggcttctggtgaaggtttttgtgctatgtcacaacatggcagagaaggtcaaaaaaggggggacacatgcgaagaacggaagaactgaggggcgtcctggcttcataacaccccactctcaagagaactaactcattccaagaaccagtccagtcttggaagagcaggaactcacccaccaccgagagaaaaacaccaacatcccattcatgagggatccacccccaaacacagaaacctcccactaggccctgcctcccagtacagccacattgggaatcaaatttcaacgttagttttggtgttgacaaacagaccatatctaaactgtggtgctgtgtgtcttagtcccttcaggctgctataacaaagtgccttagactgggtaatttatgaacaacagaaatgtgttgcttacggttctggaggctgggaagtccaagctcaaggtgtcagcagctttggtgtctgatgagggcctgctccctgcttcataaataacacctttttgcagcatcctgacatgctggaaggggcaataaagctcccctaaacctcttttataagggcattaatcgtattcacaaggcctctgccctcatgacctagtcactttccaaagtccccacctcttaatattatccctttggggattaagtttccacataggaatttcggggggggcacatacattcagatcataccactcacattcacaaggtctctgccctcatgacctagtcaccttccaaaggccccacctcttaatactatccctttggaggttaagtttccacataggaatttcggtggggggtgggtcacgtaaattcagatcataccacactgtaatttaaaacttaggaactttgagaaataaaatgttttgtctctttgtaagagacttatcgagtggtttgaacagtgcttgccttctcattgtatcctttgcagtctagaatgagcatctttcctatgcctttggcaagtggtcagttgtcctttctaagtaattgtcatcatcatgaaatgtctccaagagttcctttaacacaaactttttggccgccataacttccttcaggaactacatacctcgtcattaaattcactttcactgagatcctctggctgcatatcccaagttttcttcagtggcagcagtgtcaacattcctgtggccaattatttatttgttctagaattcatttacatgtatgtctaattttgcttccagcattatcactttgtgggtttttgctgcacttcgattttgttggccagttcctctcttgtgactatccattttcgtaacacgtcctgcaggtttagcattgggagataaggatgcagcataactacatgttttgctgtcgggaagtgaactgcatagcacaatgaccagtcaccagctttgaaaggcttgcttagtcactgggcatgatgcatctctgtttacatagtagactgaagagctgccagtgaagtttgttctctgcagttactcacagttcgtattcccatagtagttaataactgaaatttgaaccatcctgtcgggggactgataatgtttaactaagccatagtaactgaaattcatgcagctcggaaccgtgcaaagcaaggaacacacacacacacacacactctctctctctttctctcactcattgttaggcttcttcttgtgtattttattttattccattgctgttataaatagttttttccttcttgctagcattttgctagcattttaatattgtttccatataagaaagttgttgatctggacggaatgttagttttgtggctttattgagttattatttgtaacagtttttaattttctattggattgttaaggtatatcattatattatctgcaaatcattttctcatactttcctttctatttatagcttttctttcttttttttttttttcttgagacagagtcttgtgctgtcacccaggctgaagtgcagtggtgcagtggtgttatcttagctcactgcaacctctgcctcccgggttcaagagattctcgtgcctcagcctcctgagtagctgggattacaggcacccgccaccacacatggctaatttttgtatttttggtagagacagggttttaccatgttggccagactggtcccaaactcatgacctcaggtgatccacccacctcagcctcccaaagtgctaggattacaggcatgagccaccacactcggcctatacctcttctttctttctcttgtctgattgtcctagctggtacctccacaacactgcatagcagtggggatagtaaatgtccttgttctgttcttgaacttaatggaaatgcttctggtgtttcctaattaagcttgatactagttttggagttgagaaagttatatttttatgatattgaagaattatccatctactttattttgtagagaagttttattaggaatgtatattgggttaggtgctattggtttaagtgcctcctgagtatggcagtaggaaatacacagctatacccatggagtatatttgtaaaaaaaaaaaaaattaaatatgaccttgaatctaatgaaacatgtagctcattggttcccaactaagggcttttgccccctcagaggacatttgccgatgtctggagacattactgcgtttgtcacaactgagggagaaagcactactggcatttagtgagtagaggctagggatgctgctggacaacctgcagtgccccagacagccgccacagtgaagaattatctagccccaaatgtcaggaatgcagaggccaagaaactcttctagatctcactcccagttcacaagaaacatgaaggacacagggacgtgataaacgacatcaccagaaagtcctcagtgtagtccatgctgtgagagattctgcaagacagatgggcctgatatcttcaacagatacatgcatgaggggtgacgggaaagaaagaagagatattatagattaaaagagacttaagagacttaccaaccaaatatgaaatgtagatctcatttggatcctaatttgaataagacatgtctgcaaaaatcaggcaactttaagttagaatacatgaaacaagattagcaaaatgccgacaatcagttaattgaaactggatggtacggattcatcacttttatttataattttccctttgtttaacgatttccataatcagaaatttaaaaatgaatattgatttttttagatttagtctcagcaacaccaatgaaaatatgcctttttgcttccaatcctttcaaatggtgactcataataatgaagctcctaatactgaactgtctgtattcctagaataagcctcccctaaaagaatgagcacatgctggtgcacaaattaaagtttataaactgtgttctcagaagctttaagtgcctaagatttttatacaaagatgattgtcaattgtcagaattatatattctgcataaaacaatagagaattaaatggaattccaccaattccatccaatgtgaaatgctaggcagcttattgtagtcattaaatactttattgtagaaagtttaaattataacagtagccttccataattccaattttataaaaatatatgtatttttaaatactgaaaaatagacctcaaaataataataatggttatatctagtgataacgctatgagtgatttttattttcttttttttcctatatatttctaattttctacagcgaatttttgaaatcaggaaaaaagttatttacaaaattaaagcagttcacctgtcacccaaatcttggtttctgatacctttctccaataaaagaactggagaaattatcagtctagtctaggactgtggtggggaatatgcaaagtgatcctggagcgtctcaggtccagcatgtaaggaagtgcttaagaaacaaaacttgaggtgtggcagcaggacacgggacccaaccacagaggcccagggggcaaggctggaggagtttgagcaacaaaataaatagtgcaatacagaatttgcaccaatgtagggaccagccccacatgatcggtgggtttttctccctgtgtgcagagacgagagattgtagaaataaagacacaagacaaagagataaaagaaaagacagctgggcctgcgggaccactactaccaagacgcggagaccggtagtggccccagatgccaggctgcgctgatatttattggatacaagacaaaggggcagggtaaggagtgttgagtcatctccaatgataggtaaggtcacatgggtcacgtgtccactggacagggggcccttccctgcctggcagcagaggcagagagagagagggagagagagagagacagcttacgccattatttctgcatatcagagacttttagtactttcactaattttgctactgttaactaaaaggcagagccaggtgtacaggatggaacatgaaagcagactaggagcgtggccactgaagcacagcatcacagggagatggttaggcctccagataactgcgggcgggcctgactcatgtcaggccctccacaagaggtggaggagtagagtcttctctaaactctcctggggaaagggagactctctttcccagtctgctaagtagcgagtgtttttccttgacactgacgctaccgctagaccatggtccgcttggcaatgggcatcttcccagatgctggcattaccgctagaccaaggagccctctggtggccctgtccaggcataacagaaggctcgcactcttgtcttctggtcacttctcactgtgtcccttccgctcctatctctatatggcctggtttttcctaggttatgattatagagcaaagattataatagtattggaataaagagtaattgctacaaactaatgattaatgatattcatatataatcatatctatgatctatatctagcattaactcttgttgttttatatattttattatactggaacagctcgtgccctcggtctcttgcctcggcacctaggtggcttgctgcccacatcccaaagtataaaataaccacgtgtccatactgatgtatataaatggttgaataggtgggtgagaatagacacaccccatgcaaaagaattccatgtaattgacgtagatacccctccctcaaggaggcagttgattatcccagctcttacgtgtgggctgcacccagtgacccccttcccagtggtacactttggaaaccgggttgagaaagaggaacttgaccctggagaaacctgacctcagccaggggaggaaggtcaggggtgagttctcctgagagtgggatgtggggaggatggcccttttcctttgtagcctttctcccaagaacccatcagctcagtctaaccatgaaaaaaaacagcagacagccccaacctgagggacattttacaaaatatctgacccatgttcctcagatctgtcaagggcattaaaaacaaggcaagttggccgggcttggtggctcagtgcgtgtaatcccagcactttgagagggtgaggcaggcgatcacctgaggtcaggagttagaaaccagcctggctaacatgacgaaaccccatctctactaaaaatgcaaaaattagccaggcgtggtggcacacacctgtaatcccagctactcgggaggctgaggcaggagaatcgcttgaacctgggaggcggaggttgcagttttccgagaccacaacgctgcactccagcctgggcgccagagtgaaactccgtctcaaagagacaaggcaagtaggagaaataattgcagtctagaagatcttaaggagacgtgaggactaaaagccatgttgtcctggatggggtcgtggaacagaaacaggatgttaagtacacaccagggaaatccgaataaagtgtggacttcagttaataatgatgtaaggaacattggctcctgatttatggcagatgtaccccaggaaggtaacatgttaacagtaagggaaataacttttctatatatctgtatctatacctgtaactattctaaaattagaagctttttttttttaaaaaaaaaagggaaaacagtaaacaatagctcatcactcttatttttaaaaggttggaataacattagagatgttctataggatcaatttgagatttctggagtttactttctgacccagttttctcaaaaatatgaaattcttgttgcataagtctgacttgtcactgggggatcattccagataaagaattttctggtgaggcctcgggaccacatctgaatgaaagtgaggaggcgagtgtctgaacagccagcatttcgtgtctgtttcccctctgcataacataaaaattaacgtatgatagcacaacatatgtaaagtcaccttggtagaggcactaggcggaagggagtgggcatctcttggctggcaatgagctgggtgcccagccatcatggtgcagggcagttgcccttctcaagcaactgatccagagacatttgagcaggggactgtgaccacactacagtacacaccacgaccgtgtgacagtcacagatacagacactgagtttaatggcttgggggtggagaagttgccagttgcccaccctctgataaagatgttagtgaaaatattatagatttattgaggtttgtcaaaaaattgctgcatctcagatataaatgggcaaaataaaatgaattaaggttagggtttttttgtagataaccaagaataaaatgtagtgattttgttttattatgccagctgtaataaagtcttaaggagaatgcaggctgtaaaagcttaaagagaataggggaacaatttttttaaatatttaatgaaatgtcaaacattttaccacattttgaagaaataaaacattgtagatatagctaaagcctcactttcttacttcttcaccccttcctcctgagaggtaacccattgtcttgacagtgatgtgtatcattgcaggtattcgtgaataacttttctatgtatataacatatgtatgtgtatatacatacatatggatgtattaagtaatacattctgttggttttggtgttttaacaatttatttaaattaaaagcttaacagatctgtttatttttcttttcactgatcattattggcattggtttctggtgctaagtgtagatctcatgggggttttttggttgttgtttttttttccactttgtaacattccactatatgaaaataaaccaatttgttttcatatgcttgtggaagaacagtcactgtgggttgtatccttttttggtgttcatggctaggatgattcttgtatgtgtttccttgtgaacaccagaattgtgggactacaggtgtgtgccacttcagccttaatagatattgccaaattgctcttcagagtgccatacataaaatttgtacatttccatttttccacatctgtgaaaaatcttaccagatttatcagattccacattttatcagactcacttatctttgccagtctgaggggtgtgatacatttccctgattgttagtgagattgaacatcttttcatatagttgaatttattagaagtcctatcaagaattgcctatttaggccgggtatggtagctcatgcctgtaatcctagcacttagggagtatgaggtaggaggatcacttgagtccaggaggccaaggctgcagtgagccatgattccaccactgcactcaagcctgggcaacagagcaagaccctgtctcaaaaaaaaaagaactaactgcctgtttattgcctgttaagtgggctggtatttcttagagacctttggccttggacctgattcctcagagtgtatgataaaagaatacagctgcatgctatcacaaagttaaattggaggtgggtgagaaaaagagtttagtctttgaccgtatttaattgttttatttactcctatgccgtttgattttctttgtgcctcgttattgctgactgtgtctcttattggtgtaggaaagagttcaggtaagtaagttatctggtttgttaggtttgtaattaagtatttaacaaaaatgtctttggaaaagtgcatttgcagtttcctaaaaagatgacagttttacaatacgacccagcaattatgctcctgagtgtttgcccaaatgatgacaacttttatccttataaaaacttgggctttccttataaaaacctgcgcttgctgggaagctgaggcaagaggattgcttgagcccgggagtttgagactgtagtgagctatggtcatgccactgtactccagcctgggcaacagagtaaggcccagactcaaaagcaaaacaaaacaactttgcacatgaatgttcctatcaccaattattcataattgcaaaaaactggaagcaaccaagatattgttcagcaggtgagtgaacaaacaaactatgatacatccacacaatgtaatattactcagcaataagaatgatcaagccctgaaagacatgtaaaaaccatacatgcatatcgctatgattccaattatgtgatcttctgggaaaggcaaaactatggagtcaacaaaaagatcagtggttgcccgggattcaggggcaggaaggaaggatgaaaaggtggagtacagggcatttttagggcagtgaaactattcatatgacgctggaatggtggattcatggcattatacctttgtcaaaacagaattggctgggcatggtggctcacacctgtaatctcagcactttgggaggcaggtggatcacttgaggccaggagttcaagaccagcctggacaacatagtgaaaccccatctctaccaaaaatatgaaaattaggcaggcgtggaagtgcatgcctgtaatcccagctactcaggaggctgaggcatgagaatcgcttgaacccaggaggcagaggttgcagtgagccaagatcacgacagagcaagactgcactccagcctgggagacagagcaagactctatctcaaacaacaacaacaacaacaacaacaaaaaaccccacagaattgtacaacacaaatagtggaccctaatgtaaactatggacttttgttaataaaaatttatcaatatagattcatcatttataacaaatacagcacactgatgttaataatgggaggaattgggtgcaggggaggaggggttataggaggactcagttctatctgaccagttttttctgtaaacctaaaggcatctaaaaaataaagtctattaatttttctaaaaatctttcattgttaaattcagattttaccaagtgtactcaagtatgtggaacaattatgttttctaatagaaactttttaagattatttgttttatttatgaaatctaaattgctgaagctttttcaagacgactgcttccattttttgtggatctataaagaatgcacagttcatgttgaaaatcatttcgttcctttttgctttctcaagtagtagagtggtacaaagtattaattgtgtaagtttttctttgtatgattaaataatttagagcaaatattttgcatattactacatcaaaaatctttccaaatattgtaataactaaagtaatctggaatgtttgtcttgattcttactaattctttataatataaaagaccttctttcattgattctaggacttccattctaggacctctctgaaatcagtgtacctcttagaatcagtaacatcttagattcagtgaaatacgatatgtctaataagggttcggaggaagggctataataattgttacagaatcatgataatttttcactgatgttatgggaccgttctgattttcccttgcctgcctgtcttccagatgctctctgtgtgggtatgtgtgtagccatcctccttctttgaagtctcatatgtggaaacatgcaagtgaccaaaattacaactacgaacaagtaaacaaggctattaacgacgcgatttcacaaagtggcaggtatttcatcctaccccctccctttattgctatatgtaaattaaagccaggattaaatctactagtcctacattgtagcctcctcacggtgtgctgtgtttgttttgtttttaagagttctggggaaatcccctggaaagactcaattaaagagcagtgaagagagtgcagatcccgtcactggaagttcagaaaatgcagtgtcatcttcagaactgatgtcccagactcccagtgaagttctgggtaccaacgagaatgagaaactgagccctacaagtaatacctcatatagtttagaaaaaatctccagtctggcccctcctagcatggagtactgcgttttactcttctgctgttgtatttgtggttttgaatcaaccagcaaagaaaacctcttggatcatatgaaagagcacgagggtgaaattgtaaacatcatcctgaataaggaccacaatacagctctaaacacaaattaggtggaataatgactcgagcaggaaagcagtagaagaggattccttcaccacagtttcacctttacgctgtcagacaacttcctgccacagaagaagtcgttgatgtgatttttgaggaaatgacagatgtgactttggaaccaaacttgtaataaaaggaattccaaatggacaagcagtaatgatatttaaatattttgagtgagggggagtgggtcaaagaggaagtagaggtgtaatcctgtattaaccctctgtcaccccttcttagtgtcgagtgtatttattaataaaagcttattagagtgtagaaatgccagcaagagttaagaaagggcttttcaggaactattctaaaagtcataaaagggtcacagtcttaagcagagcttagttttcttctcacttgtcaaatgcagactgtgaggcctccagtgagaaatgggaggcagttctgggagggggttttttcagtgtcaccaacagagtcaacaaggaaacataattagagggctttgaaatgatctactgaaatacctaaattgatagaaattaatcatactcaatctaggacatgttcctttactccttaaaaaagaaaggaaagatctctaaattcaaagctagattgtaaataggcattcaagaagtattgtcttaaatttacgatgaatttcttgtgagcagaggacgaaacaggtgaattctcaccagactcaaaccagatctcaattcgtagtaatgctaaatcgtcttccgtgttctcagaggttcttttcagtgtctgtcagaacttggcatactttctccatagtacgtagaccttctaatactctgctaaatgaaaccacacttgttatctgaaagtgtgtgaaagaaacaatgtatgaaaatttacatttgatcatccggcattggaaatagtttgaactatttccaaaaatcccttaggggatgaggggtgaaatttaaaagctcctgaaaatgagtactgctgtgttgagcttttctttcctggggtatattaatttagttatatttagcagaagaggaatataaccaaatgtgactaaaatatagcagaaattcaggttgtttgtaaaaattttaataacaaatagcatttggcaagtctataggattcttcctatctggaaattctattttgttagagtgcgataggacatatggaaaaccaacacaaagtgctttagcattaaaactcaccatcaaatagatgtaatcttattaattacacattttgtattttaattatttcaaggagtgaagaaaacagggtgtttttgtttttgtagttctgattactcatttatgcattgttttgtttaagtaaattctgcctacaagtgaaaaggtcggtgcgctcttctgtgcaccatcctcacggtgctatttccgaatatctgaatattgatttctaacacctggatgaggctgtgaccgatcaacttggaacactgtaaaggttttcgaatgggatacgctgtaggcacgttttaagaagtattctgttcctaaagtccaggtatgattggattaatatttataaaattattattaggaattatttaagtggggccaggcatcttgcaacattttctgatttttttttctttctttctaatctcattttggtgatatttaaacaaacataaatgattgtaactttgcagcttttttatttaggtagctttaatttatttatgaaagttaatccatttctgatacgtggtttttaaaaatatgaaatggatttatatatactatattcctcaaatccactgtatgtggacttatattcattttctccttttttcggaattgaaacattttaatttcaaattcaaatagaacatttaaaatgatttcattattattacccatactgttgccactcatattgtaagtcagttttttcattgctggtacaatgactcagtatttctttataaaaatctgttgttctgaaaatcaacaaccttagaaggattttgtcttagaaaatttccttggctttagttttatatcatatttagaaaataataatgaaaagcatccccaaaatttcaatgatgtgaatttttaaattacctttatttctttaaactaattccattgattgttacttaaattttccacctggaatcatggatttaaaatttccccacctcatggggaaaaaactaacccagaagttcaaagcctttaaagtttcatctgattctggccttagaattgtccttaaaagctttctcctggccgataggaggaagcatatatcaaggaggttctttcccttcccattatcattttgtggcaagccttaagttaacaatgtgtctaccaagaacaattgagttttctaaaagtaataatgaagattatgcaattctaactgtagaagagatagctattaaaataatcagtagcctgggcatagtggctcacacctgtaatcccaatactttagaaggccaaggctggaggactgcttgagtccagaagtttaagaccagcctgggcaacacggggagaccctgtctctacaagaaattaaaaattagccaggcatagttggcacgtgcctgtagcaccagctacttgggaggttaaggtgggaggatcacttgagcctgggagatagaggcttgcagtgagccgtgatggcaccattgcactccaaccggggtgacagatgaggtcctctgtttacctccccccccaaaaaaaaaattcagtaggaattccttcatagaataacatgttatttattggtattgacttcttattagacagagctcatagtatttgttttctgctccgaacacttaaaaaatactaagacgtgatagtgaaaatagctttgaaaagaaactacatatggcaaaggtggggaggggggaagatgatgcattctgatcattataaagaatacttttcagggctctatcattttctccctttctctaatcatccagaatatggcgggtgtcccagtgttcaacagtatcatgctaatattccatttgatcggtagtccaagttctttggccagatagtgcaatgttgtgacaccgaccgaagcctttgttctggatctttcttcctattgaaggtggctgctggtggcttcataattttctgttttttttctcacaaagtaaatggtgggcatccatgtttacattgcaccttcccgtgctgtaattggcttgacaaagacaagcaggcttctctgttgagacttattgtgtttttagttttcatagacacttatttaatctttttaaattgtacagcaaggtgctctaagtaatattcgataaaatatatttaatagaaatttgcgtttgatattcatgaacatgaatacatgtatttttttaagaaataagtattgtgtaacactatggcattgcttctatagccaaagtataaaaatttctggaatactgacatgtaaagactacagttaattctgacactgtatcttattaaaataggatgatttgcattttgtaaaattatcctgcacatcaagctgcatgccttaaagcggaaactctaggactgtgttcatgggagagcagttcatctgttcagaacagtgaggcaaggtctgtagtgcttctttaactacctttggaaatactgtacaatgttagaataatttattttgctttacaggagtttgtcatgtattgactttaatattgtattttggtaataaattttttgttaaaaaaaacttggctccaagttctattaaccacaggttgtgttcattcttttcctggaaatgatgactttattgcttagaaagttgtaaataattaaaagcttcccaagagttaaatgaaggttatgatgactcttgataacttgttaatctgttgctgactagcattagactgttacacgaagataaactgaataagcatttagctttttaaatcattttaaaaattaagtctaattttgaagcttttttccttgctacccagttcagtttctcttccaaatgtgacacgcttatatgctttcaattctgatatagtcaaagtgctaaagactagttctgctattgacgaaggaattagcattccttagtgaaggccaaaaactacagtgatatgttcacaccttgatcactctgtcgtctatacagacagctattgacatatttgttgcattgacgaagctaacatcatctgactgtatcgtgggtctggttatccatttgtgccctagaatcctgggtcacctcagttgaaagtgaccaaggccaaatatttcgtcccatgcttcccagggacaacataatcatatcccctgtctttgaaaaacccaatctgaaactgtgtcactaacctccaaattaaagaatccgagcatggaagctctagaacgtatggtccagtgtggcagccactataatatctaagtgtaaaatacatagcagttgcaaagacttagtacaaaaagaatggaaatgtattaacagttttttatattgattacatgttgaaatgatattttggtttaaataaaatattaaaattagttttacctgtttctttagctactaaacagttttaaattacatatgtggcttacattatatttcttttggacagcgctggtacagaagagagattagcaaactagggccctctcttcaaagccaacctgccacctgttttggcaaataaagttttattggcacacagccatgcttttgtgtgtgtacatatcatatatggctattttcaaggtacaacagcagcactgagtaattgtgacagagactctatggcccacaaaacctaatttaccacctatctgatagaaaaagtcttctgactagacctctgaactagaacaatggtataatttgtgctctagagctaccaggaagaaaacggctttttacaaagaaagctttttatagtagtgctttataactaaattagtttcttcctttgtaatttttatagtctacctgtctacagattttaaccatattttatgactttaacctattccatcgctgatatttaaagccagtttgaaataacaatgcataattaaataataaactaattcaaaatgcagctataaaaagtctcgcttgcctcctgacagctttacggtgttgatgttggcccccacggcttcaccctgtcagtggtgtgggactacagcacatggcctgcaaatgtaaccatggtgcaacgtaaccccagtgactaatccacttggctggggtgacagttgaattgaataatccaggatataaagaaaagagtcttaaatgcacctctttataatgaatagcatgtgcaactccaaagccagcttcaaaggtagggaggaggtggtagttggctttggtctagagctgttgattaaactggcagagctacgaaaaagtccatactcttatacatagatttcttccaagtcaatcagtgaatatgtaaaatgagaacatttttggccctgtaaattcatagagaagttactaattggtgccatacgatagactgacttaggtagtgtgttttggtgtgtatctcagaatccaaatcagcggagcatgaaatgctgaaaccatttccagagacctatgtgtacagcacaatccagtttgcatgctgtgctaggggactatagacctcatttttctagtggtacattaataaatatactgtatctagttttatttgaactgtttataagattatgacagctttggtttctttaatctcctgattttttttccaataatgggtaatcagtttaaagcgtttgccttaccaaagtagattatgtaggtaagaaggttttcttttgaattaaaaagtttaatgtcaggcatctaatataaattcttactggcatataacaaaatcgtatcacgtgttggtggctttttgctccctaactaactaaaccagatttacaccagttgtgttacttaatccagatagaaaaggtgtcattctgtaataatttgtaaaaatgcatataagacaggtacttctacaatggggtgtttgttttaaaaggattctacatattaggtaaatgtggaaaaaacatcttaaaacatctttaaaaaaaaaattgtcaccagacgcagtggctcacacctgtaatcccagcactttgggaggctgaggtgggcagatgacttgaggtcaagagttcaagaccagcctggccaacatggtgaaatcacatctctactaaaaatacaaaaattagccggttgtggtggcacacgcctgtagtcccagctacttgggaggctgagcctggaggattgcttgaacctgggaagcagtggttgcagtgagccaagatcacactactgcattccagcctgggcaacagagtgaaattccatctcaaaaaaaaaattttttttgcacaaatcagaaaatcatgaatccttagccatgagctcagacccaactagttcacctttctgatttctcagctttgtactttgttaaaaggaaaaacaaaaaagaatatttataattacccatgttactaccatggattcatcagtaataatcaagtatggttttaaaatgagaaagtatgttatcttaaatgtatacacaatggaaagctggacctgaatagaccctcaacaaaataaaacattcatttttcaggacttttattagcacctactagtgacgtttaaaggcttattgtcacaactgtgcacatctccaattttttttctacttgtcatctttagtatccatatttcagaaataatgtggctgtgttttactgaaataggcacatcaatccacatcttgttctttttgtttatatctgcagtcccatttaaattcagtatttccaaccacaaacggtgttagaaaattctatttccagcttatgagaaaaagtacagcaggatatggttcaaagcttaagctgtatttatttctgctcttccagagctagcattccacacaaaaaaagttatgctgaaataaacagtggtaggaaaccaatggtttcaaggctatctgcactttctaaaacccttctccatgtgaaacctgggaacacagttggtgcggctatgcctccctggaatgatgatactggagtccaccacagttccatcgcagaggtgaaaaactctaacatgaggctcttcagcatttgggcccacctggagcaaccctgtgctcagcctgcaaatgcagacaaaaacttcagtgtactaacagttgttttttaaagttccagggtacatgtgcagcatgtgcagacttgttacataggtaaacatgtgccatggtggtttgctgcacctatcaacccatcacctaggtattaagccctgcatgcattagctatttatcctgatgctctccctcctcccaccccaccccaccacaggccccagtgtgtgatgttcccctccctgtgtctatgtgtcctcactgatcagctcccacttataagtgagaacatgtggtgtatggttttctgttcctgcgctagtttgctgaggataatggcttccagcttcatccatgtccctgcaaaggacataatcttgttcctctttatgtctgtatcgtattccatggtgtatatgtaccacattttttcagtctatcactgatgggcatttggatttcatgtctttgctattgtgaatagttctgcaatgaacatacacatgcatgtatctttgtgatagaatgatttatattccgttgggtatatacccagtaatgggtactactgcatcaaatggtatttctggttctagatctttgaggaattgccgggcgtggtagcatgcacctctaatcccagctacttggaaggctgaggcaggagaatcatttgaacccgggaggcggaggttgcagtgagccaagcttgcgccactacactccagcctgggcaacaagagtgacactccatctcaaaaaataaaaagtaaataaaaataaaagtatacctgcaaaccagtccaaatgctagtcaggtgccatcttcaagtcaggtgctatcttcaagtcaggtgccatcctgcaggcccaaggcatagcttactagttctatcgagtggcctcgtgatcaggtaggaaaaccaaatcagcacttgtctttaaccataatccacgatgaaacttactcttgaaagataaagtggaacaaggcatggcgcagtggctcacacctgtaatcccagcactttgggaggccaaggcgggtggatcattttaggtcaggagtttcagaccagtctggctaacatggtgaaaccccatccctactaaaaatacaaaaattagccaggcatggtggtgggcacctgtaatcccagctactcgggaggctgaggcaggagaattgcttaaactcaggaggcagaggttgcagtcagccgagattgcaccgctgcactccaacctgggcaacagagtgcgtgagattctgtctcaacaaaaaagataaagtggaacaagagcttcatagccatattcctaactaggttataccttacaaaactaacaagaatacatatggacatgagatacaaagggcatgatcgctaattaaaaccctaaaacagtaacacctatctactgtaaacagacaagtcagctgcacctatacattgtattaaataccgtaagagtttttgaaattcaagaagacatcaggccaagtacagtggctcactgtaatcccagcattttgggaggcaaaggcaggaggatcgcttgaggcctggcgttccataccagcctgggcaacatggtgaaaccccatctctacaaaaataaaaattaaaaaattagcctggtgtagtcccagttactcgggaggctgaggtgggaggatcgtttgagcctgtagtgaactgtgattgcaccactacacaccaccctggttgatagagcaacatgaaagaaaagaaagagaaagagaaaaaaaaaaaggaaaggaaggagggaggaagggaggcagggaggaaagaagggggagggagaggaaggaaggaaggaagaaaggaaggcaggcaggcaggcagacgaggggaggggagggcaggggaggggaggggaagggaaagaaagaaggaaaaagaaagaagaaagaaaagaaaaagaaaaaagagagggaaagggagggagggaggaagaaaggaaaagaagagtgagaagaaagaaaaggaagaaagggaaggaaggaggaaggggaggaaggggagggaggaaggaaaggaaggaagggaaagggggagggagagagggagggaggaaggaaggaaggaagggagggactaatggtgtgcctgacgccatacacatcaaccttaaccttcaaaagaatgtacttttcacatgagtaatggcaggtactgccagttgttcctcaacatccattcttctatgatcacagaatttttagctgggcacaaagctgcccaggtaggctgtatttcccaggcttccttgtagctacatgaagccatgtgaccaagttatggttcatgggatatgagtagtgatacatgaaacttctgaagatatcacgccaggcacagtgtctcatgcctgtaatcgcagtactttgggaggccaaggagggagaatcacttgaggccaggagttcaagaccagcctgggcaacatggtgaaaccccatctctacagaaaaatacaaacattagccgggtgtggtgacacacgcctgtagtcctgttacagtaggcaaacagctagacatgagcaggagggggagcccctgagaaaaggaaggtctgggaagcctcatgcccaaggaccacccaaaatttgctaattattaacatctctaatggtggagggggtgggcaatgagtccagtgtgagcaaggaggagggtaaatacctatgcagaaaggagcaccccttaagactcctagtaatcacccactcttcagttaacctctcagaatgtcactagctgtgtgctgataaggagggaaagagggcaaagcagaaattcctaagagataccaggtgcaataaatatagatctgacctctatacaacctcctggggtggcggcaatgagcaatgcagccatttggtagagttcatacccaacaccggccacacatacccaccaactagtagtaagagagggtcccgtgagcctgggagggaatgcggcagggataaaggcagggacttaaggcagaagcagggaaactagacaaagaaaaaaggcagggacttaagacagaggtgggaacttccagaaaaaaatctgacatcattaaaacccaccgcagaattctcggggtggctgctggctcattctgtctccacagctggctctgcctcatctttcagagtattctgtctctctaaataaactctctgctctctattttccttcaatcaattctctcttttttggctaaactgcctcgtggccaaattccttctcccaaggaagactaagagctgaggactctgcccttccaggtaacacccccaactactcaggaggctgaggtgggaagattgcttgagcccagaaggtcaaggctacaatgagctgtaattgcaccactgcactccagcctgggcaacagagtgagatactatctctaaaaataaaaataaaaaatatttttctaaaaaagagattaaatgaatctaggatcacagagttcaaagttggctgagaaaatataccagttgtccttgaaacattcactgtatttgatggctatcttttctctaaacatattgtaatgcaaatataaaattgttttgttttataaaacaatagaatacatcagctgaagttacccccaaaagaaatgaaagaaacttctgggtgtgccctcaaaattaaggggagttccacctccccttctttctctgttctgccacctgttatgtaaatgttatgatcactgactatgagaacaagcacaggacagaactcctaaaactcaacaacaaaacccaattcaaaaacgggcaaaggacttgactagacatttctctaaagaagatctacagatggccaacaagtacatggaaagatgctcaacatcactaatcattaaggaaatggaaatcaaaactgcaatgagataccacctcatacccattagggtgactactatcaaaacataaaaaagcagaaaataataaagtgttggtaaagatgtggagacactggtacccttgtgcaccattggtgagaatgtaaaatggtacaatcactgtggaaacagtatggtggtctaatgggcacagagtttcagtcttagaagatgaagagttttggaggtatatgctggtgatggttgcacaacattatgaatgtaataccactgaactggacatttataaatagttaagatcaggcaggcgcagtggcaatcccatcactttgggaggccaaggcgggcagatcacttgaggtcaggagtttgagaccagcctggccaacatggtgaaaccccatcactactaaaaatacaaaaattagccagatgtggtggcgggcgcctgtaatctcagacacttgggaggctgaggcacaagaatcgcttgaacccaggagatggaggcttcagtgagccgagatcacagcctgggcaacagagcaagaccttgtctcaaaaaaaaaaaaaaaaaaggttaagaaggtaaattttatgtttttttgccacaaaagaaaaattttttaaaaaacaactgtgacatttttgttggaaggaccctgggtccctgacattgtggaaccagactgcttacatgacagaaataaacatcatttcagccactgtcttttgggtcagtactgaaccctcagctcttatttccagtctgccccaccatttacatatagagaaatacattaaagggaaaagtaaaccaccaggattctgcaaggatccaaccaccaaaccctagtctacatcggtgtttccacctttatttcattaccatcctcctaagcccttcaaggcatttttcccaattaatttccccacccatgacacagaagtactgtattgtttatctttctaggtactgtaagtgtatctatgctttttccttttttctttattttgggacggagtcttgctctgtcacccaggctggagtgcagtggcgtgacattggctcaccacaacctccgcctccaggtttaagcaactctcttgcctcagcctcctgagtagctgcatctacaggcacgtgccaccacacctggataatttttgcatttttagtagagacggggttttgccatgttgaccagggtggtctctaactcctgaccacaggtgatctgcccacctcggcctcccaaaatgctggattacaggcatgagacacagcgccaagtctgtacatctatgctttatacataaaaatagtaatttttttcaacccccagggaccagttttttcccactggggggtcatattgccatagggaattcacccttgtatttaaatgaactggtttaatgaagatagttacaggaaaagctatttatttcaaacctcatttcctggtatcttgactgaacatccaaaagggtcaagagattgtgatgagaaacctgtgagaggaggctggatttgttacctctatcacgtggagaatcactaaagtacaacaaaatcaactcagtacagctagactccatctagctgttgggatagtttccatctcagagcttttggacctggacagttgcaatcaaacctgtggactttatgcataaggagtcctttgggttagctcatctctgtccaccagttgactcaggaaggtttgtggggagcacttgataagtgttagtgaaaatccagccctgcactagattagccataatttaaggcatgataaaatgtctgaattcgagagtgttagaaacacatccttttctggctgaaagtcctgcttacaacagggaaaaaaaaaaaaaaaaaaaagtcccaggcctgacaatatgccttggcatctattagtgggaaaaatctgctgctgagatttgtggacacatgtgtacatgcctgttttgcaggaaatgacattacagcagtccaaggaaacaaaccagaaggaccagccaaggacactgattctcggactaacatctagagaatcagcacatgtggcaaaagcttatgcaataaaacatcatcatctgctttaactgaataccttacctattcgtgtcctcattcaaaaatacacaacagttattctaaccatggaaatggaaaaaagtgtaggtggtaaccatggaaatgaagaaagtacagacaagtagaggtaagcagagaagcaggtgttaaagaagaaaatgaggccagacacagtgactcacccctgtgataccagcgctgggggatgccaaggcaggaggattgcttgaggccagaagtttgagaccaacctgggcgacatactgaaaccccacctctactaaaaattaaccgggtgcaggggctcacacctgtaatatcaacaatttgggaggccaaagtacgtggatcacctgtggtcaggagtttgagactagactgaccaacatggtgaaaccctgtctctaataaaaacacagaaaagttagtgaggcgtggtggtgcatgcctgtaatcccagctacttgggaggctgaggcaggagaatcacttgaactcaggagatggaggttgcagtgagctgagatcgcatcattgcactcggtctgatgacaagagtgcaatggatgacaagagagaaactctgtctcaaaaatagtaacaataataatttaaaagaaaatgaaacaaaaattccatatgtaaatactttgtgaactttacattttatagaatccttggatttgtgcacctacgctaatctgtctaaaaatttcactattttaaagcactacaaatctagttaatataaagttgaacaaaggaagagaaaaaacacaaacaatatttcataatgctttttctgaatgttcccggaccaaatcgagggtcaggctgcttattctcacagcccaataatgagacgcagatgaactgggaaaggagggagtttatttctgtaactggatacagggagaaggcctagaaattatccccagaccaactcaaaatcacagtgttccagagcttatataccttctaagctatatgtctgtgtgtaagtgtgcattcatctacagacataagtggtcgactttttctgatctctaactaagatctgagtcctgaagaccttcccctggagcctcagtaaatttatttaatctaaatgggtccaggtgctggggtgattacccttatcttgtttcctgctaaatcatggtttggggagttccttcagaccccaataaacttgcctgtggaggcctggggagtttcttcagacccccaataaaacctgtataatcccaaacgggtcctgtggaaaattcctcattatcttgtcatgcttcaaggcccaggaaaggccagggcagaactcttggtgggcttttgttacattccagcatttgtatagggcactggctctatcagcttttaatatttaacttcgccactcagtcagtactgaaacggttgtcatggaggcctgcattagtgagacctggcctgccacatgaagactcacagaggagaagccatctattgacaaacattttaaaggagggaaagaggaatccaatgtgatgtcagtgactgtgggactctggaatgatgcgagcatagaggaagctcatccctgacacttggcctgggttccctaagacccacgcatgccaagccaatctcagaggactgccatagacaggccccacctctgtggtctctgacatgagtcatacacagtgtgtgtaaaacaatccaatggaatgtatgcagaaaacactaggatttccacgtgtagtcactttgcttaaaaatatgtttatatgggctgggtgtggtgcctcatgcctgtaatcccaacattttggtaggccaaggctggaggatcacttgagctcaaaagttcaagactagcctaggcaacatggtgagaccttgcctcatttaaaaaaaaaaatgtttatatgtatacagaaagagaagacaaaatttttttctgataaaagtttggaggctgggcgcactggctcacgtctgtaatcccagcactttggggagaccaaggcaggcagatcacttgaagctaggagctcaagaccagcctggccaacatggtgaagccccatctctactggaagtacaaaaattagtcaggtgtggtggtacacgcctgtagtcccagctactcaggaggctgaggcatgagaatcgctagaacccaggaggtcaaggctgcagagagccaagatcgcgccactgcactccagtttgggaaacagagtgaaatcctgtctcaataaataaataaataaataaataaataaataaataaataaataaaagaagtttggcgaccattgcattgacttttaccaagatacttgaaaagtcaactaaattggatgaaagtactgttggaaaaaaatatatgtagtataccaaactgccccatacatgtttctgtaagggaatactcagcattgtaaatatctcatttctcccaaacatttctaaacactttatataattctagtaaaaatttccatggattctgttttagaacttagtaaatgattataaagtttatctgagcaaataaatatgcagaaattgccaaaatatgtggttaaaagaagtgtaatgaagggtcaattgccctctcaatatgaaaacattctataaaataattaaaaacatgtagaactgtttcaagactaattactttttaaaatcatttaaacataagtgtcatcttataatacaaaaattagccaggcgtggtggctatagtcccacctatagtcccagctacttgggaggcggaggtgggagaactgcttgagctcaggaagtggaagttgcagtgagccgagatcatgccactgcactccagcctgggccacagggcaagaccctgtctccagaaaaaaaaaaaaaaaaaaagagtgagcttataaataagccatatacatatgggaattcagtatgtggtacaggtaatttaaatcagtagagtaaggatgatggtgaaataatcaactatctaatttaaaaaaaaattgtcaagtctctcccacaccatattaaaaagttataatatttttaaatactagcagaaagaattaaaaaacatttacaatcttgagatggggaaggtttttctaagcatgatggaaaaacccagaaggtataaaagaaatttgacaatataaaaatggaaaatccctgcatagcaaaagacatcataccagatacacaataatgagaaactatctgcagcatatatgacaacagattaataaatacccataatcggccaggcgcagtggctcacacctgtaatcccagcactttgggaggccgaggtgggcagattccttgagctcaggggttcaagactagcctgggcaacatggcaaaaccccatctctacaaaaaattgttttaaattagccaggcacacacctgtggtcccagctactcaggaggttgagatgggaggatttcgtgagctcagaaggttgaatctgcagtcagctgagatggcgccactgcactccagtctgggcaacagagcaagaccctgtctcgaaaacaaaaacaaaaaaaactcataatctataaataatcccgtcacagcaagattaaatagatggtgaaagaacacaaaaagacaaattatacaaaagaaatgcaaatagccaataaactcctgatatattgtcttcacctcattaataaagaatgcacactaatcatgtattatttgtcacctaagattggcaaagatttaaaaactaattgttggcaatggcatggagaaataagtgtcataatacccactggtggaagagaaaaacaatagaatctttaacctttttggaatgtagtttaccaatgtttatcacaatttagaatatgagttctagggctgggcatggtggctcacaactgtaatcccagcactttgggaggccgaggcgggtggatcacttgaggtcaggagttcaagaccagcctagccaacatggtgaaatcccatctctactaaaaagacaaaaattagcccggcatgatggcgggtgcctgtaatccaagcttctcaggaggctgaggcaggagaatcgcttgaacctgggaggcagaggttgcagtgagacaagattgcgccactgcactctagcttgggcgacagagtgagactctgtctcaaaaaaaaaaaaaagaatatgaattccaacaaccctgtttccagaaatacatcctaaagagttacataaatataagtatgttcttacagcattccctgaaatagcataaaactagaaacaacctagatgtccaactagatgggaataaataaatcgtaacacatacatacggtggatattgtattggttatctatcattgtacaaaattacccccaaaacttagtggcttaaaaaaacaatgtacatttattatcctcatagtctctgtgtgtcaaatacttgggagtggcatagatgggcacttctggcccaagatctcttatgccgccatctgaaggctgacctgtagctggccgatctattaggttggtgcaaaagtaatcttggtttttgccattacttttaatgtcccaccaacctaatacttccaagatggctcactcccatggctgccaaggtggtgcaggctgttgcctacgtggccttctctacaggcagtttgagtgtcctcactacatggtggctggcatccccgctaagtgagcaatccaagagaggctaaggctgaaactgggatgtcttttatgacttagcctcagaagtcccacactgtcacttccacggtattctgttgttcacaaagaaaaaccatgattctgtggaaccggatactgtatgaggataaacatgaggcagcacagatcgtgtaagctgaggtctaaaggctgaagagtacctagtcaattaaagagggtttaagactttttataagccacgtgacaaacctctgacagaggtttatgtgaatagaaagtgaaggagaggttgaagagggaaacagagcctgattcgtggcagtccttacaagctgtgtcatggagcttaatttttataataaagccaaaacgcctccaagggatttatattttagtaagatcactatggttattacatacaggtaaatggactacggtggtggcaacagagatgagcaaagtgaacaagatctgaggtatttacgagataaatgccaacaggactcaatggatgattggatgtgtggattacacaatagagaggaatcaaggatggcttctaggctcttgatttgagcaataaggtaaatggagcacacagaaggaaccgcaagtgtggggattagaaaaaggtttaacatgttgagtttgaggtgtttacacacatggaaatgtccaataggcagtggacatatggcacctggagaccaggagatacacctggacataaaaacaggagttatcagagtatcagtggaaatcagatccacgggccacagaatcattgatttttaagaggaagaggaggccaggcatggtggctcatgcctgtaatcccaacaatttggaaggctgaggcaagaggatcgctgcagcccaggagtttgagaccagcctgggcaacagagagaccccctgccacccccaatctttacaaaaaaatttttaaaaaattagtcaggcatggtggtgcatgcctgtaacctagctattctggaagatgagatgggaggattgcttgagcctttgagagcaaggctgcactgagccatgattcagccactgcactctaggctggatgacacagtaagtcctctttccaaaaagggagaagggaggagaagaagaaagaagagaggaggaggaggaagaacaggaggaagaggaagaagaaggaagaggaagaaagaagaaaagaagaaagaagagaaagagaagggaggagggaggaggagtagctgcatgaaacttaaaaggaatgcctgaaaggtagacagaggaaacacgcacagtctgttgtcacagaaggcaggaatgatggagagtgtttatactaagtcaaacaattgaaaaatgaacactgggctgggcgcagtggaggacacctgtaatcccagcactttgggaggccaaggcaggtggatgacttgagatcagaagtttgagaccagcctggccaacatggtgaagctctgtctctactaaacatacaaaaattaaccgggcgtggtggccagcacgtgatgccagctactcaggaggctgagacaggagaatcgtttcaatccgggagacggaggttgcagtgagccgaaatcaccccactgcacaccagcctgggtgacaaagttagactctacctcaaaaagttaaaataaataaaatttttaaaatggacatcatgtatcagacaggaaaaagccagtaagacggaagaactcacaccctcgggatcccaagacaagatacttccatgggatggatgtaatgaacagtgttaaaagatttctggtgcagtgcttctcaaagtgtgatgtacacataaatgacctgggggtcatattaaaatgcagattttggctacacaggtcttgggtaggacctgagacctggcttttctcagaagaccccaggtgatgcccatgctgcacagcccacagaccacatgttgagtaacaaggttctgctgtggttcccaaacttttccgagcacagaattatctggaaaacttctgtactagtccatacagctatacatactgctataaaggatactgctacaaagaatgcccaagactgggtaatttataaaggaaagaagtttaattgactcacagttcagcatggctggggaagcctcagaaaacttacaaacatggcagaaggcaaagggggaagcaaggcactttcctcacaaggaggcaggaagaagtgctgagcgaagaggcaagatccccttataaaaccatcacatcttgtgagaactcactatcatgagaacagcatgggggaagctgcctccataattcaattacctccacctggtctctcccttgaaaggtggggattatgggaattacaattcaagatgagatttgggtgtggacataaagcctaaccatatcaacttcttaaagattagtggtcccctagccctacagattctaaattgagtaggcgtggggtagggcctgataacatgcatttcttaacaacctcccaagtgatggtgacagtgacgctgcagatccccagaccacacttttgagatgcacagcacaactatttgtggccctggcagagacaaccagggagactatttaggcttctaaacctactgcaaaccggaagtcttgctatataccaccactgcagtcacagtccattacaggagcccattccttttatagtacctccctggctccgggctcatatggccagaagtgtgagcaaggacctacactcattatccatcacctccatggttactttatcagaaccaaagactcattcttaattggcttattctccccaagacttactctcagcagtaggtcctacttaggaaaagtctcaaagcttcatcttgcttaggaatgtcttttcatagtattaaaaaaagcagctactgctgaattctactttctttttaactaagcgatgatatttcacaatggtcacatttcccccagagtgaaacaacttgagagaaaaaaaaaaacctataaaataagagggaaatcctatttaaggggaactcaattcacctatgtattcatgaaacagacacatgcacataaaggcatcttaacgtgaaaaataaacatacagtccttgccctcaagccaggcgacagaaaagctaccaacaaccaggctgaaacaagacaaatgccatctgaaaaaacagctgacatttgtttctatcaaagccatccagcagatacctcaacatctttccacagaacgtgtgctctttactaacaaccgacacacaaaggaggacgatctccaacagaggtgactaggaaaggcttcctggatggcgtaatttagtgttggagtcagaccaatgagccgccttttcacgggtggaggtcccagatggccatccctttaacaaaaatcaattaacatgtaaattatgtactgacaaatacaacgtttgatgggcccgctgcagtggctaaagcctgtaatcccaacattttgagaagctgaggcaggaggcctgcttgaactcaggagttttagaccagactggtcaacacaacgagaccccatcactataaaaattaaaatgaatctcagctactcaggaggctgaggaagcagggtcacttgggcacaggggactaaggttgcagtgagctacgatcacaccactgcactccagcctggacgacaaagcaagacccccatctctacgaaaaatttaaaaattagctgggcatagtagtgcgagcctgtggtcccagctactccggaggctgaggcgggaggatcgcttgcgcccaggaggccgaggttgcagtgagccgtgatagcaccactgcactccagcctgggcgacagactgagagcctcacctgtaaaaaataattttaaaaaaggttccacctagtgttttccgtggtgtgactaagaaaagtatctagaaataaagcacagtcagtacctgctctcaaaaaacggctgccaatctagtttggagacagaaaaatatacccgactgagaacacagaggagcctgttttcggaagaggggcgtctttggagacgcaaaatcctctccgcgggacgctgacgggcagtcggtaaaggacttccaagcactggtcagtgacaatcgggcgctggggctttgccaaggcccggaggcggcgcgccaaaccgggcaatgcgggaagcggggcaggcccgagtggccctactgctgccgtccctactgatccctgcgcatccgccacagagcagggaacggcagaaaggaggaaggagggggagttccgtaaatcaggccctcaggggctcccaggcccgcacccctctcaagccccggggaccaccgcggagccgctgctccgggccgtgcggctcgaggcgaacctgcctcagagccgccgggccctcctatcccgagccgtatctctagctccggcctgaggtggccggcgactgcgtgcgcaaacacaagatccgcaccccactccccgccactgcagctccgcggccgcgctcagagtctccggaacagaccggactcaatgcggaccaggcaagcggaagtgtgccgcttccttccggccagcgcagcacgagacgaggcggggaaccgcgggaggaggcggggcctagtgttgacgaacagctcccggggcctatgggcgcgggggcagccgcccggcctctccggcgcgccccctccccggggctgttgacgccccccagcccctcatttccacaaagctccgcggcggttctgccctccttgtacccgcggcgcgctgcggcccgtggcgcggccccgttcccgcctagccccgtcggcctccttcccctcccggagccgcgcgtgaggacggctgaggccgcaggtctgtggcggcgcgccgggacgcgcgggcgagggtctaccgagagggcgggcgggcgccggcggaaccctcggctacagccccgagcccctggggccgcccctccccgccgcgtggcgcagtcggggggcgcggccgcggcgtcggggcgtcgggaggggcggagcgcgggagtgtctgccgggacgcgggccgggctgggctccggaaggaccaagtttgcggagcggcttctgctcgtcggccgtgcggcgaggcagggcctgggctgcgaccccggcggccgctcgcggtcttgggagagctggggcgcgtgcctgaacttcccggctgcccctgtccttggagacctacctgatggggacgccaggtgtgcaggggcgtggcgcgtaggtaagcggacccggtgcctgcctcgtccaggggatgctcactagagcgctaggcttttttatttttattttttagagacaggggtctcgctgtctcgcccaggctggagtgcagtggcgttatcacggctcactgcaacctcgaactcttgggctcaagcgattctcccacctcagcctctggagtagctgggaccacaggcatgcaccaccgagcctggctattttattgtatagatagggtctcgctctgttccccaggctggtctcaaactcatggtctgaagtcatcctcctgcctcaacctcccaaagcgctgggattacatgagccgcctcgcccggctagcgctagtcgtccttattaataaagaatcgcttctggtcccttttcagttgtttacaatggcattccttttgatctgatggaggaactttttttcttagttcatgggactgttgcagtgcctgacacataattggtacttaaatatgtgttggttttctgccttaacatattagaatatatgaattgtttaaaaaagtcctctcacacttagggaggactctaggatgaggtcacatgggggataagcccatctgtggctgtaggactttgttaaacactcctcttctccctctctgttccagattctccatttccagtgcttgaaagcacagtacttaaatctggcttcctgcttttttttttttttttggtatgaatgaatacatgaattgtataatgttagttggtttgttctgtagagcaagttacccttaggaattaataaactgtggaaacaatcatgtcaggctactagtcacatttaagaaataattagtaagaggctgttcattattcagaggagtgaagcaagatgttctggaggactggaacccgcttactcactgccaccactcccccgcctcccacttgctgctgccaaaccaggctcctgctcccccccacccattactcccaccgacgctccctgggatagcagctgccctgattggcacacccccgcagtcatcaccactgaggcgtattcctgaagctgccagtgtgaattgttttatagaacactggtgttaaaattcaggtacctgagacaaaacaatattttaattcttcaaaatccggttgtcaacacatttactatggagtatctcccacgtggccacttctgtgggaggtactgaagacctactaccgcctatggaagtagaaaataatatacaactgtgtagttacgtgacgcattgcgtggtaactgctatggctcagggagggagaagatcagccggaactggaatgtcccaagatgttctggaagaaaagcagtggctcgtttgtgttgcttacctgtattcctgactcctggcagggcctgctgtagagcacatgcttcatgaataaatatgattgagttgaataaatatttgaattgtgttttgagtgtagctttgaaggccagcaacgatttagatggcaagatcgagggcaggctgggcacaatggctcattcatgtaatcctagcactttgggagtccaaggcggggaggatcgcatgaggccaggagttcagtaccagcctgggcaagatagggagaccccatctttacaaaaaataattagccaggtgtagtagcacatgcctgtagtccagatactcgggaggctgaggtggatcacctgagcctgtggaagtagaggctacagtgagccgtgatggtgccgctgcactccagcctgagtgacagtgagaccctgtcttggggggaagaaaaaaaaagggagggcatgctaatagagggaaaatggcataagtaaaggcatttcagcatggatgagcacggggtgtgttggggagaaggcactgacgttgatggcctgtttattgctatctaggagtgatttggagaacaatgcatgtaagtctgacatcatgatgtccatccggcaaagaagagaaataagagccacagaagtttctgaagactttccagcccaagaagaaaatgtgaagttggaaaataaattgccatctggtaggtgatttaaactaaagcagcaatttgggttgcttttatttctgcatattaaaatgtcactctccaataggataaaaatttggtgggacctaacaattgaaacttgttgtagtaccctgatattctaattgcaatttgattagattgattttacagttatgatttgacaaaagatgaaagagctttgattagaagtgtttgtcagctgtctgttcattaacttacggttcttccaatctcatcctttgactctctagagtaatggtccccccacccacaccccagattttagtctctctctaatttttctggtcgtgtatactatttacaccaggcaaccttaccttgggtgagtttccattaaggtagtgaaaggtggatcaacattttttaaaaattctttataattagtcaaattcctgaagttttcttttgcttttttttttttttcttttattggtgggaaaagtaatcagaacttggtcagttgtttgtataatggtaaagacttgctaagtgatgcatcagatagcattaattaccaacttcttgcttcctgagtagcttttgtaactaaagcatggtcaggattttaaaagttaacatgaaaatcttcatacccattaaccattttggatatctgacagaatttacattatttacagccatgttaattcttaccagccaggctagtaaagcaattcagggaaacagtttaacaaaagtaatctgtaatgggaggtcatgacacctggctcagccattagcgagtgattaacacgttttggataatagtactttctgaacaccttaaacaatgcaaagaaaaagaaatatactcccatcctgaaactaacaccagtggcactgtcttgctgtcttaatgtcatattctgcacatgtatacccataagcattcgtatacagttttgcaaaattgggatccacgtgctgttttgtagcttgctatttttctcttattatgttatgaacatgtcataagccagttaacgtatttttgaaatatcatctatgtaaagtatttttatagctgccactgtagaagtgaaaggttttcttaccatttgctaatacagacagaactgtgatcaatttccttgtggccatatgtttgtttaaaactttatttccttggggcatgtcttagtccatttctgttgctataaaggaatacttgaggctaggtgatttataaagaaaagaggtttctttgcctcagggttctgcagactgtatgagaagcatggcaccagcatctgcctctagtgagacctcaggaagcttccagtcgtggcagaagacttaggggagccagtgtgtagagatcacatgaccagagtagaagcaatttccagggaacacaggatgtcaggctcttttttaaccaaccagctcccctaggactaacagaatgaaaactcagtactgctagaatctcaccaacctgtttataagggctctggttccatcaccacaccacctcccattaggccccacctccaacattgggaatcacatttcatcatgagatttggaggggccgaatagtcaaaccacagcagggtacatgcctagattgggaattactggccaaatgggatgctcattttggtggcttttactcactgctgccatgttgcattccagagaggcaccaatttattcttctagcagcaatgtttgaagatgtctattttttatacccttaccaaaacagtattagcattttgaaagctgtcaaattggccaagatttaagtataactcacagttttgatttgcatttctttaacattaatgaatttaaacatcttcagtctgttattattattggccacttttttctattgtacattgcctgttcatgtccttaatctttttcctactgcagtattcatcttgacaggacaataaattgtcctgaaataaaataaattgtcctgaaagtattcatcttatgttaagggtatttaagctttcttatatgtgctatccatattttgcctagtttatatgtcctttaacttgagttatgttggattatttattctgtgggtttttccccccagagcattcctgcaaaacctgtgggtttaaaaaaaaagttttaggtaatcggccaggtgcagtggctcatgcccgtaatcccagcactttaggatcccagcttgggtgggtgaatcacttgaggtcaggagttcaagaccagcctggccaacatggtgaaaccctgtatctactaaaaatacaaaaattagccaggcatggtggcatgtgcctgtagtcccagctactcaggaggctgaggtgggagaattgcttgaacctaggaggcagaggttgcagtgaaccgagattgcactactgcattccatcttgggcaacagaacaagatcctgtctcaaaaaacaataattattttttaggtaatcaagtttttaaaatagcttttaaagaataagccaccaattgtacctagattatctaaaagatcgattacgtcctagacacgtaacacatttagtcatccatttaacagacttcatagttaaattacggttgttaaactgtgccggacagaggccctcagtattaaacatgaataagataatgtatttgtcttcaagaagctcacgttgtagttggcagaatggacacatggacagttagatacggggtaacagttgtaatagaatgaaaacaggtctgtggaatcagaaaggaccctccgctggagacaggaaaagctttcccagtgacaggcagctagacttagcttacttgataatctgaagtagaactattacattctgatttttttactgacttagttatttatctgttccatttttccaaaaggttgtaccagtagaagattatggaagattttgtcattgacaattggtggaaccattgccctttgcattggacttcttacatctgtctaccttgccacgttacatgaaaatgatttatggttttctaatattaaggtatggagtttctttgaccattgtatcattcactcagtgggatctccagtagtaagccatgtggatgaatgaccaaggcaacacagttttgccataaagaatccaatctctagaaaggttggactatagagtgaaataacttttgtgtttattattttaaaataacatattagaatctttttttaaatttttctttattatttatttatttttgagatggagtctcactctgtcacccaggctggagtgcggtggcgcaatcttggctcactacaacctctgcctcgcaggttcaggtgattcttctggcttagcctcccaagtagctgggactataggtgcgtgccaccacacccagctaatttttgtatttttactagagacggggtttcagcatattgaccaggctgatctcgaactcctgaccttgtgatctgcctgtctcagcctcccaaagtgctgggattacaggcgtgagccactgcgtccagccagaatctttatttttcattttaattttttgagatagggtattgctctgtcacccaggctagaatgcagtggtgcaaacatgggtcactgcagcctcaacctcctgggctcaagtgagtatcctgcctaagcttcctgtgtcactgggaccccaggcatgcaccacctcaccaagctaaatttgatttttttgtagagacagggtctcactttgttgcccatgctggtctcgaactcctgggctcaagcgatcctactgccctggtcttccaaaatatgagaatgagccatagcacccagcccagaatttttataatcaagtgagttttttctttttcattaacttattccatttatttagcagttattctaaattagtatttttcaagttatagattgtgaaattagtgcagtaggtcatgagtaacatttttcttaatgaaatcaaaaagaaagaatactatcacatctagtagggttgaggattgttttgtgaaacttttaattttatatatatatatatatgcacaaactgggtcacagtatacaaggtacttccttttcttttttttcttgttggctacaacaggaaaaaaaaaaaacagaaaaggaaataaaaaagccactgctttaaatcatggggtctaaatgtggctccacagagggtcctcagcatgttcatgactatctaatactctgtgcaagtggttttgcagggcatagggcgatggggaagccatatgtttccagggaaaggaactgtaattttaatcagattttcaggagggttagccgggcgtcacgcctgtaatcccagcactttgggaggtcgaggcgggcagatcacttgaagtcaggagttcaagaccagcctggccaacatggtggaaccctatctctactaaaaatacaaaaattagccgggcatggtgacacacacctgtaatctcagctactcaggaggctgaggcacaagaatcacttgaactcgggaggaagaggttgcagtgagctgagatcccaccactgcactccagcctgggcaacagagcaatactctttatcaaaaaaaaaaagaaaaaagttgagggggtggtctgtgactctttaaacacgtttccttgttttctttctctctctctttttcaacatttctagaactcctcttggcattgttttcagaactcgtatataacttacatgtggaaatttgcatccaaatataccttacattttaatctaatatgtcatgatctttaacctaaactgtggtgtctaatgactagttgcttgtaaaaataaacaaacaccttcaaagccaaagatgtgtatctataagaatgttcgaaagaagtgactgatgaaggatctgaagacattttccaaagaaagttttccaaaacattttgagctttgattctcttactgaaatgagcctcgaaaggatattactttgatgacaaatctaatttataagaatgacctctagtgtgtttatttttaaaacttgctgtgttactttatgggtacagtatatatatctttatacaaattatcatagtaccaaagaagaataattctttttttttttaattattattatactttaagttttagggtacatgtgcacaatgtgcaggttagttacatatgtatacatgtgccatgctggtgcgctgcacccactaactcgtcatctagcattaggtatatctccctatgctatccctccccctccccccaccccacaacagtccccagagtgtgatgttcccctcaaagaagaataatacttatctttcagtgacagtaggtagttcttcttgtcagaagaattttactcgtttatatatctttttttgggaggagcgggggcgggcagggtctttctctgtccccaggctggagtgcaatggcacaattacagctcgctgcagcccccaaactctgggctgaattgaagcattactctcaccttagcctcccgagtagctgggaccacaggtgcacgtcactgttcccagctaattatttaattttttgtagagatgggcctactatgttgcccaggctgttctcaaactcctggactcaagcaatcctcctgcgttggcctcccaaaatattgggattataggtgtgagccgctatgcccacctatctctttaaaatggagtgctggcagggcgtggtggatcacttgaggtcaggagtttgagaccagcctggccaacatggtgaaaccccgtctctactaaagatacaaaagaagagggccgggcgcagtggctcacacctttaatgcccgcactttgggaggccgtggcgggcggatcacgaggttaggaaattgagaccatcctggctaacacggtgaaatcccgtctgtactaaaaatacaaaaaaattacccgggcatggtggcgggcacctgtagtcccagctactcgggaggctgaggcaagagaatggcgtgaacctgggaggcggagcttgcagtgagccgtgatcgcaccactgcactccagcctgggtgacagactctgtctccaaaaaaaaaaaacaaacaaacaaaagaaattagccaggcatggtggcacatgcctgtatttccagctactcaggaggctgaggcaggagaattgcttgaactcaggaggcagaggttgcagtgagctgagatcatgccactgcactccagcctgggtgacaaagtgagatttcatctcaaaaaaaaaaaaagaaagcttgtaaagcgattccctagaattaaaccatgtagtgcgtatatattaacataagtattttgaaaaaaggctgaaatatctctgtgtgagcagatagcccaaattgaatgctaacaaccgtatagcaaggagacatgttgaaagagatcatataacttaattataaactattaagtgtagctctttaatttaaaacttgtaaccagccttcctactttccttaaataaatacaccccatcatcaagaaacttgaacacccttggtttttctctctttactttcactgggttaaggaagttctagttttacctagtatttactgagcacctgttctgtgggtaacattgagttcaacactgcagagaacatggaaggaataacaaagatttctgaatttaccagcagattttccagtatagtaagtgaattgagtaaatatatattaagcacctacagtatgccagcaggcactgtgcttagtggtagcagtatcactgagtaagataaggccatgcccccaaggaacttacactcttgagaaggatacaggtcagtatccagacaattacaggacatcccaactcggtgctaggatggggtgagatagagagcactgtgggagcacataggagtggaagcctaacctcattttggaagatcagggaggcttttctagaggaaatgatggttaagtagacctgaaggatgagtaagagttaaccaggcaagttggggaggaaagatgagtgtcctagaagagggacaagtgcaggaaattcaagacgcaagagagcctggtgtgtgaagcgttggcagtagttcagcctggctagagagtacaaggggagaggggatgtactgggaatggtaaacagaggccagataataaagggtctgtcttctctgtctcaaagatagaactctctctgaatgtattatagtagtgaaccctatttttagtagaggcagcgatgtcatcgtattggcgtttcagaaagttgccttaggctgtgatgtggaaaatggatttggggagagcaaaactaaagtcaggaaactgctaagataatccaattcagtggattcagtaatatttaaatattgcattcaaatattcagtgagtatcttctgtatgccagacacttttctaggccctgggaataaagcattgaatacgacatagaacttaattatgatgaaaaggggaaaaatcagaaagaaaatgaaaatgaatcctacggtgaaagtcacacgggatgatgagatagtcactagaaggctacttggaattgggaagtaaagccgaccactttgaggacatgtaaaccaaaacctacatgatattatagaaggaaccagccaagctaagatctgcgagaacattctaggcagaggaaacagcaagccaaaagtctctaaggtaggaatgaacttggcaaatccaggatcagagagaaggtgcatgtggccagagttttatgagtgatgaggagaaggtagaagagaggagaagaacagatcacttagggctttgaggctgcataagagttgcagagtcgtgaacagagtcagagctttttaggaagtggacttggaaggatgtcttgattcattgtgtggaagtctgttgagagagaacagttgagaggctgtcagtccaagctgcttgctctccttagcagcggggtggatggatggacatgccattttctgtgacaacgagcaccgggaggagcagagctggaggatcagtaagttctgacaccagctatccaccgttaggccaaaccccacaggatgagggcacagctctctacaaaaatgccttcgtttcacacaccagtggcacgtttggggcccccccaggcaaccctcacttctgaccagctggctacaaattctgaggttcccaccacccactcaggttcaataattcactagaacaactgacagaattcagggaagtgctatattatgactacagatttattatagcaaaagattacaaatcagaacgagccaaagggagtgacacatgcagccaagtcttcgagggtcccattggaagctttcattatcttttccccatggagtcaggcctgttaccctcctggcacatcactgtgttacactatgtggagccaaccaaagaagctcttctgagtactggtgtctagtttttattgaggtttcgttatgtaggcatgattgattggattattgcccacaaggctggactcaatctccagcccttttctgctccttagaagttgggctgctagcacatggctcaaagccctgactctcaggccacatggttgagtgttctggcttggccagccccaatcctgagtcatctccttagcacaaattaggagctcaccctgtcacctgctagcccaggctttcagatgaggtctgaagaacctaccatgaataacaaagacactctcatcacttagaagttccaaggatttagaggctatctcccaggaactggggacaaagagcagccagattctttattcttagagggtagagttttgatatggtttggctgtgtccccacccaaatctcatctttaattgtagttcccataattcccacatgttgtgggagggacccagtgggaggtaattgaatcatgggggcgggcctttcctgtgctgttctcatgatagtgtcacgagatctgatggctttatttattttaatttttttctgagacggagtctcgctctgtcgtccagactggagtgcagtggcacgatctcagctcactgcagcctccgcctcctgagttcaagcaattctcctgcctcagccacctgagtagctgagcttaacaggtgcgtgccaccacgcctggctaatttttgtatttttagtagagatgggatttcaccatgttggtcaggctgatcttgaactcctgaccttgtgatctgcccaccttggcctcccaaagtgctggaattacaggtgtgagctaccacgcctggccagatctgatggttttatagaggggagttccccgtcacacactgtctgcctgccgccatgtaagacttaactttgctcctcattcactttctgccatgattgtgagacctctccacccttgtggaactgtgactccattaaacctctttcctttataaattacccagtcttgggtatgtctttattagaagcatgaggaatggactaatacaaggttacctccccgtaaccagggacagaggtcagccaaattctttcttgcacaggaggaaaggcagggaacaatgagctcaggtttgactatgttgtgaggcacttttaaagcagtccacctagaaatacagaataaaggaagctagacttacggggctgaaggcaggagttccgtctgtgttggaaatgggcattttcatcttaccatcttgtagatgtgtgggtgagattgtttcaggagcgtgtaaaatgagaaaggaaagagaacctgggccagtttgtgtctgtgcctcagataccatctgggaagctataaaacaggcgcttttccccacccaccacccttgtcctctgaaacttacaattgagctcagagtcgtatccatttttttcctctttgttcaagcagtagtccatagcacacattttgggttgtctcctatatcacaagaagaatcctccaatgttagaaccatttctcaaacctgttaatacctctgcctaggcatttggttttgtgttttgcttagattcgctagatcagcattgtccaataggactataatgaaggaaatgttcagtgtatgcactgtctagtacagtggccacatgtggctattgaacacttgaaatggggtagtacactcgggaactaaatttttttttaattaatctgatttaatttttaaatatgtacatattttctgtaaataaacaattagaaattataaatatcactgaacaaagaccttatttggccaaagaaaagctcatttttggagtgtatattcctttataaatctcctgtaatttataccatttctatattggggaattatttgagaagagtaaatctgctttcctttcctgttttggggttataactttttctcatcaaaattggtaggttagtgtttaatgaaaatactttgattttatttttgaatactttgaagtagttgtaattattcagagagtaaaagtattggttatgtaatagacaagtcatacactgaatttatgcattcaaaatgattttttaaatgtttgttgtattgtttgtatatgaaaagtgggaaccctgaaatagcaactggaaagttgaaggaaaagatactggtttcatatagtagtataaaagatatatctagtatcctttctcagcatatttttaaaattttaagttatttttctattgtcttcattgtattatatttcccttgctaggaaattgaaagtattcaagattttttaaaataccctttattgaatgtctgttacatgcttggaactatttgggggcattttaatacatattgtatttatttgtacctttttttttttttttgagacagagtctcgctgtgtcgcccaggctggagtgcagtggcgcgatctcggctccctgcaagctccacctcccgggttcgcgccattctcctgcctcagcctcctgagtagctgggactacaggtgcccgctgccacgcctggctaattttttgtattttttagtagagacggagtttcacagtgttagccaggatggtctgggtctcctgacctcgtgatccacccgcctcggcctcccaaagtgcagggattacaggcatgagccaccgtgcccggcctatttgtacctattttttgagacaggttctcactctttcactcaggctggagtgcagtggtgcaatcaaggtcactgcaaccttgaactcctgggctcaagcagtccaccaacctcagcctcccaagtggtgccagctaattttttcattttttgtagagacagagtctcactttgttgtacaggctgttcttgaactcttggcctcaagcaagcctcccacctgggcctcccaaagttctgggattatagacatgagccacaatgcctgacctacatattctgtttaagctgcctatcttcagagcccaaacactaactctaaattgtcctttcaatgcaacctacttttttactgccctttattgtaaacaaaaagtaaaaggcactcccccattttttttttttttttttttttgagacggagccttgctgtgtcacccaggctggagtgcagaggcacaattttggctcactgcaacctccgcatcccagattcacacggttctcctgcctcagcctcccgagtaactgggattacaggcaggcaccaccacgcccggctaatttttgtatttttagtggagacggggtttcaccatcttggccaggatggtctcgatctcttgacctcatgatccgcccgcctcagcctcccaaagtgctgggattacaggcatgaaccaccacacccagctagtaaaagcctgttttcttacttggtgttctgcccttatggtgcctggcacgtcatcagtgctaagtagcttccagtcttctgcaatagagtcaactgctggggctgaggggtatggggtaggcagaggaaaaggggaggcactggctgctgtgaagaatctggatgggaactagaaccaaaggacatgacttccggagcttgccttcaaggatacgatatggttagtcatggcaggtacaggagccagtggatgcattttaagtgatttttgtttagtagttttgtttttttttgttgttgttgttgagatggagtctcactgtcgcccaggctggggtacagtagtgtagtcttggctcactgcaacctttgcctcccgagttcaagcgattctcctgcctcagcctcctgagtagagtagctgggattataggtgcgcaccaccgtgcccagctaacttttgtatttttagtagagacgaggttttgccatgttggtcaggctgttctcaaactcctgacctcaggtgttccgcccatctctgcctcccaaagtgctgggattacaagcatgagccaccgcggcctgccatgtgtttaataaattgtatagtagacatctgtatagtcttcatttttagtttttgagtgtgtattgttttttaattattgaaactatgttgtaacaatgatgaaaaattttaaatgaaaaacattacttaatattcattacccttaacaaaaagcagttttcatttttcccttccattcttcatcctaagtgcctaaatattttacttatttatgaccccattatagttagtttttataatctaccttatctgctgttacatactatgctttttccatatatacattttcacaaaacttttataattatgtaagtagttatggttttataatttcatatttttgaagtttttattctcttgattattccactatttccatgctcccaactttggatagttagattgtttataatagtacagttaaatcctaacagtgcttacttattctcactttaaagtggcaatgtagtggtatcagttccttctttcttggaattccctcagagcaattaaggaatgtgaaaaatagataatcaagttccagctttgatgaagggggctgccaaatccagtggcactcagaaagatgctgagagaagagtctgcggccaggcaaggtggctcacgcctgtaatcccagcactttgggaggccgaggtgggcacatcacttgagtccaggagttcaagaccagcctggccaacatggcaaaaccctgtctctactaaaaatacaaaaattagccaggtgtggtggtctactcctgtaatcccagctgaagcaggagaatcgcttgaacctgggaggaggaggttgcagtgagtcgagattgcaccactgcactccagcctgggtgacaaagcgagacttcatctcaaaaaaaaaaaaaaaaaaagagagaggagtctgtaagctgcaggggtcagataaagtgagtaaagtgtcgtcctccaaagttagtggcatctcctaaggggtaaaaccaacagcaccctgagtaggaccatgggatgggtgtgcaggcagtagtggcagccgctatcttggatccactctgctatgaagaacagcatgctaggcaggccagaaggagcgatcacagagacaagccatatttgttaagagatggaatttaagaggacaggaatgaagggaggcaacctgcatttcgaagatccccaaagctatcaagttctgttgactaaaatgaggaaaagactgaagaactcacccttgtaaaccaccctatacaatgaaaattcttgctgacctgagctgtgtgcctggcctcacccccacatgaacttcctgcaagtagcttgtgtagtaagaacttgccacattctgacataactgataaggaaggaactgggacaagattgtccggtgatactgcaacaaaaaagggaagagaacaacaagcagacatcattggtgaagaacagtcaccagaataattttacagtggagatgtggaggttgtaaccacacgtgtcacattaaaagataatcctttgccactgtggaagatgaatacaaagcagaaacataagaaggtatgtgccttcttcaaggggaaacaggaagagaacaaaaggaagtgaaatatgaactggcagactttagacaagaaatagaattacaaagtagaatcattatagaaattatgaccgtctcagatgcaacatacaggagactggaatccgtagaatgtacagaaagagcaatgttggacaggactgagagaggtcaacaaaatgaaaggagattgaataaagtgacagtatgagaaagcaagtgacaattgaggacaaagagcagcaagcatgcatcatttgtgtcccaaaaaaagagaacgagaacaataaatcaggaaaaacacacacacacacacacacacacacacacacgtttaaagatgtaattcaaggaaactttccaaaagtaaaaggaaatttgaatctactaattgaaggggcagagcagtttccaggataaattggcctagaaaaatcattagcaggatagagttctctgaagttgctgaacttaaatatgtaaagaaacctttggacattctagacgaaaagatcaagttaccaataaggagaaacaaaagtcaacctagcattcagtttctccacagtaatgtctaatggtcaaagaccatgaatgatgcctagaaaatgctcaagtaaaagaaagtgatttacacattttaacccagtcattccattgcatataaagatggcatacaaacttttttgttcctagaaatatgtacttttaagaatacctgaagaaattggaagaggaaaaacttcatccatccatgagatacatggaaaaacaatgacagaaagatgctcagtggggctcaaatttatttaactataggactaaaactaaaaattagtgatagaacaaaatgtgtatgatataaataatgttatattaggtacaaaagtaatgtaggtcttgtcattaattttatttatttatttatgaaacagagctcgctctgtcgcctaggctggaatgaagtggcgtgatcttggctcactgcaacctccgccttctgggttcaagcagttgtgcctcagcctccccagtacttgggattataggcatgcaccaccatgcccagctaattttttttttttttttttggtatttttagtagagacagggttttgccatgtcaggctgttcgagacatgccaggctggtctcgaactcctgagctcaggcagtccatccacttctgcctcccaaagttaggattacaggtgtgagccaccatgcctggccgccattacttttaaatggcaaaaaccacaattacttttgcaccagtctaatacacaagaatgccaacataagtaataatgttataatgcataataataacataacagtgtaatacgtataacacaagataaaagaagaaggggaagagagggtaaaagatggtggaggctgactgggcacagtggctcatgcctgtcatcccagcattttgggaggccaaggcggcaggatcgcttgagctcagtagttcaagacaagcctgggcaacatggtgaaaccccatctctaaaaacaaaaacaatttgccaggcatggtggcatgtgcctatagtcccacctactcgggagactgaggtaggaggatcacttgagctcaggacacagaagttatcattagctaagattgtgccattggcctccagcctgggtgacagaatgagaccatctcgaaaaaaaaaaggttggggaggccagctggcacagtggctcacagctgtcgtctcagcactctggagggcaaaaggtgggaggattgcttgagcccagaagttcaagaccagcctgggcaacatagtgagatcccatctctacaaaaaatttttaaaaaattagctgggtgtggtagtgtgcacctgcagccccagttacttgggaagctgaggcaggagggtcacctgagctggggaggtcaaggctgcagtgagctgtgatcacaccactgcactccggtctgggcaacagagtgagaccctgtctctaaaaaaaaaaaagaaataaataaaaaaaaatggatgggagtatcctgatttctttctcttttataactggaagtcagaaagtttgatttaaaactgataagacacacaagcctgggcaacatggtgaaaacttgtctctactaaaaatacaaaaaaaaaaattagccaggcttggtggcacacagcttacacccagctgcttgagagggtgcaatgggatgatcacctgagctcaggaagccaagtcttcagtgagccaagatcatgccgttgtgctccagcctgggcaacagagcaagaacctgtctcaaaaacaaaaaaaggtctctgtagatcttcaagttgacctacagagtcaacatgatccctctcagaatcccaggtggacttttcacagaaattgacaagctagtcctaaaatgtatatggaaactcaagggactcagaatagctaaaacagttttgaaaaagaagaacaaagttgtaagactcaaactttctgacttcaaaacttactatacagccacagtaatcaagactctgatgctggcataaggatagacatataaatcaatggaataaaattgggaatacagacataaatccttagatggtcaagtgattttcagcagggcaccaggaaggacagttacgtggagaaagaatagtcttcaataaatggtctataaacaaatggatattcacatgcaaaagaatgaaattagaccactgcctcacaccatacacaaaaattaactcaagatggatcataggcctaaatgtctaaaactataaaacatttagaagaaaatatgcaaatgaatcttttataactgtggagtaggccaaaacttcatagagaccacactaaaaacacatgattaaaaataaataaataaattggtgttcatcaaaattagacatttttgtactccaaagtacaccatcagaccaggtgctgtggctcatgcctgtaatctcagcagtttggaggccaaggcaggcagatcacttgaggtcaggagttcaagaccagccgggccaaaatagtaaaaccctgtatctattaaaaatacaaaaattagccaggcgtgatggcacacatctgtagtcccagctactagggaggctgagacagaaggatcacttgaacccgggaggcagaggttgcagtgagctgagatggcgccactgtgctccatcgtgggtaacagagcgagactctgtctcaaaaaaaaaaaagaaaaaaattaagactcaaaagtcaaaattattccttgatccatgggctgtagaatagattttgtgttagcaggcatgaaaataacacagataaccagatgcattatcaatgagcagtagtattttgaaaagaattttttttttctgtgtagtagatctcaacagtgggcctaaaatagtaaatcgtgctgtcaacacatgggctgtcatccaggttttgttgtccatctttagtgcacaagcagagtagatttcacatcattcttaataaggaccctaggattttcagaatggtaagtgaacattggcttcaacttaaagccaccagctgtattagcccctaacgagagtcagcctatgctctgaagctttgaagtcaggcattgacttctcctgagctgtaaaagtccgagatggcatcttcttccaatagaaggctgtttcatctacattgagtatctgttgtttaatgtaggcaccttcatcagggatcttagctggatcttctggatgacttgctgcagcttttccatcagcactttcagcttcaccttgcacttgtatgttagggagatggctacttcccctcaacctcatgaaccaacctctgctagcttccagcttttcttctgcagcttcctcacctctctagccttcacagaattgaagagagggccttgctctggattaggcgttggcttaagagaatgttttagatgatttgattttccatcagagcattagactttccccgtatcagcaatgaggctgtttttcattcttatcattggtgcgttcactggagtagcacttttaatttccttccgtaacttttcctttgtgttaacaacttggctctttggcacaggaggcctagtttttggtctctctcaactttcgacatgctttcctcactaacttatcatctctagctttccatttaaagtgagagatgtgccacacttcctttcgacgcttagaggctattgtaaagttattaattccgatattattgtgtctcagggagcagagaggcctggggagaggaaatgagacagaagaatgacagagctgtcagaacacacacatttcagttcaccgtcttacatgggtgtggtttattgtgccccaaaacagttacagtagtattaataacatcaaagatcactgatcccagatcccgtgacaggtataataataaagaaaaatgtgaaatattggaagaattactaaaatgtgacagagacaaaaagtgagcaatagctgttgcagaaatggtgttgatagttgtttgatgcatagttgccactaagtttcaatttgtaaaaatgcattatctgcaaagggcgggaaagtgaggcacagtgagatgaggcgtgcctgaagtcgtttccctttgtttacaatgtgttctttctttggtgtttcgttgtttgtttgtttgtttttgaggcaggatcttgctctgtctcccagtctggagtgcagaggtgcgatctcggctcactgtagcctcgacttcctgagctcaggtgattctcccactgcaacccctcaagtagctggaactacaggggcataccaccatgcccagctaattttttatatttttagtacagcctgggtcttgccatgttgcctaggctggtcttaaagtcctgggcttaagtaatccacctacctcggccttctaaagtgctggggttataagcgtgagccaccgcacccccgcattcttctttcttgttggaacataaacatctttcggtcaaatactaaattcttgcacctttttgtttccccagcaaataaatatgcaatgataaggaaggcagttctcctttggctataagcaccaacatcactctttctttttagtcttttttccttgtgctaacattttccactgttattcttatttacttgatattgccgaatttgcatgtcttcccattgaatactcctgcaaagcaaggagactttagaatagataggggtaatccacacaatagtagtacggtagtgctaagactgctgattgcctgagtgtgggcccagtggaagaactgtcacttcagtagcagactgccctcctcacaagccctgcttggcacttctcacatgccacggctttaatcaactctggggcaagaatcattcccctctaacagatggacatgaatttaaccagacaataaaccatgtatgtgccataaatatgtttgctgagggcatgattcccagtacagaactttaagaacagctgtcttatgggctactatttcttggtgagatgatttgttaacctaattctgaaacagattacatttataaagttaatttttcggtggcttccccactactagcagtctaattattttgggggacaatttttgtaaacaaatctttttttttttttttttttttgagacagagtttcactccatcacccaggctggagtgcagtgccgggatctcagctgactgcaacttccacctcccggattcaagcaattctcatgcctcagcctcccaagtagctggaattacagacatgcaccacaatgcccagctaatttttgtatttttagtaaagacggggtttcgccatgttggccaggctcgtctcaaactcctgacctcaggtgatctgcccacctcggcttcccaaagtgttggggttacaggtgtgagccaccgcgcctggcctgtaaacagaacttttttacgtgagttgttcttgtttttttaaacatgagttgttttgttttttttaaaaaaaagcaagaggagaaagacttcaggaccattgcgatagatgtagggaccactgcaatgaggtcttgcagtggtggagagagattgtactcaacttctagtacatcatgggtgagtaggaataggcagccaaggagcggattggggtcagtggctgggaaatgagtaagaggaaccactgggatgcgggggatcctggctcaaccaggcttagagggttcttgctaaaggcaggccagagtgaccagacattatgtgggggatctatttacgtgagatttttaaaaagctaatttgatgtttcctttccaaatttggtgtcatttgtctcaaaggactctagccttttgggcattgccagcaacttgtctgagtgcctgtggggaatgtgatcatttattgtgagcagtcattttttgtgtgtgtgtacatctattaaattgctatatacactgttacttcaatggttttagctgtacagttttttttttgttttttttcttgttgttgttgtttgtttgttttgagacggagtctcactctgtctcccaggctggagtgcagtggtgcgatctcagctcactgcaacctctgccctccgagttcaagtgattctcctgcctcagcctcctgagtagctgggattacaggcgcctgccaccgcgcttggctaattttttgtatttttagtagagacggggtttcaccatcttggccaggctggtcgtgaactcctgacctcaggatccacccgcctcagcctcccaaagtgctgggattacaggcgtgagccaccacacccggccagctgtacagttctttataaatacaagtcttttgtctttccacttctttctgtcattatcttcgaagatgttttcgttctgtcaacattgcattccccatggaacctgtgcaaattgaatatgaagtatttgttcgttttgcattctttagaggataactactattggtgtatattttcacgggtgtgatctaccaagcgaagtataaattgctgtaaaactggaaaagtgtttgaatgagtgaagcagatgttctcttagcatgaagcagatgtaaaacttgcaagtgtctgtctaataaagtatagcatttggttctgtacagctggtgctagattaccaattaatcatgtttgaatgcatttttactaattaggtccccctctgttctttgtgcattctggctataataaagggagagatgggacacaaaagctttctacctttagtactttgagcagtgttttttcttattccctggtcttttattcttagaaccatataattcactctttcattctttattggctctccagtttgatttgggatgtaggtgtgacaggattttcacactcctcaagtgcctttgaacactttaaggaagctagagaaaagaaaaataatgtaattaatgttgttgttgttgttcttaatttgcatggacaaaagctagtatttgctcagttaacatcaattcatagcctctgtggttatttgaatgagtaggagtttggacattctagaaacgagtgataccaggttggttttaagttctcaaaagcaatagagcacgttttctcaaagataaaaaatgagtggattaaagtaactacccagaagagttgcctttactgctatgaaagatacaacacaaatcactagcaatgaaagtttaaaaagctgtatcattatgtagtagcctttttataacgcaagtgtgttattgaaattaaattttaggcccaggcactgtggcttctgtctgtaatcccagcactttgggaggccacggcaggaggatcacttaagctcaggagttcaagaccagcctgggcaacatggcaaaaccctacctctacaaaaaatacagaaattaggtggacatagtggcatgtgcctgtaatcccagctacttggaagccgagaggatcacttgaccctgacacgcaaaggctacgatgagccgtgatcatgccaccgtactcagcctgggtgacagagtgagaccctgtctccaaaaaaaaataaataaatttcagaacctgatgggcctttttttaaatgcttgatttccccaggataaattggttttctgtgaaaggaagttcaatatataagatttgctaccctacctcccatttttctaaaaggaattaacaaacaatgataaaaagatttagagggtagcagaaatatattaaataaataatttctaagtctgaagataatagcatgaatggttctttcttatttatttatttatttattttttgaggcagggtctcgctctatcatccaggctggagtggcttgatcatggctcacagcagcctcagcctcccagtaggctgagtctcaatcgatcccccttcctcaacctccccagttgctgggagttcaggtgcatgccactatgcctggctactttttttttttttttttgtagagacagggttttgccatgttgcccaggctggtcttgaactcctgagctcaagcaatccacccacttcagcctcccaaagtgcatggctataggcatgagccaccgcacccagcctgagtggttcttttaatgagatgtttattaccatttgaaaattagttggagttagggggaagcaaaatgagctaaaagaagttcatcagctagaaaatgagatgttcagtatttatcactttcccccattgggtttgtggaatgtgaatctgctataatatgaaaaagcatggccgggtgcagtggctcacgcctgtaatcccagcactttgggaggccgaggcagatggatcacctgaggtcgggagttcaagaccagccttaccaacatggagaaaccccatctctactaaaaataccaaattagccgggcatggtgcacatgcctgtaatcccagctactagggaggctgaggcaggacaatcgcttgaacctggaagttggaggttgcagtgagccgagatcgcaccattgcactccagcctgggcaacgagtgaaactccgtctcaaaaaaaaaaaacagatcgaattatattttagacagtgtgttacagattttaggacatggtttgttttgttttgtttttaacactggtgtaaaagaatctctaataacatagattataactttttatttatttatacttttacaggtacaggttaagtatccctcatctgaaatacttggggccagaagtgtcttggatttcagattttggattatttgcatatatataatgagaaatcttggggataggattcaggtgtaaagatgaaattcatttatgttttatgtataccttatgcacatagcctgaaggtgattttatacaatatagttcataaaacaaagtttgtagacactgaaccatcagaaaacaaaggtgtcactatctcaaccatcccagtggacagtctatggttatttggcatcaccattgttcctgactctgaatttacatggtgcctttataagtaatcattttgttatacttattcgtacataagtacttaacaataaaaaatatgacataccatcaatacggtgaaaaaaataacactttcagggtaacttgtgtcatcgtgttggctctcagaaggtatccaattttaaagtatttcatttggatttcagcttttcaggttagggctgctcaacctataaataaagtgtatcatctaacagtattaattggattattccagaaagtcttccgtgtcattgttgcccattgcttctgttttatagtaataatttaaatttaataaaagtatcttgtaactaaattggctaatagctatttaagttttcagttcttctagggttgaatacttatctaaaagcagtttaaatatttcatgtatccatttacctgcataaacctcttcccaccagggttacgcttgtcagagtaaaattcatgtgtctgccttatttgactacaaataccttttattcttagaataaaatgaaaatgattgatcttatgtaatattggtagcttttaggtaggtgtctaatgcaattatatttcttttcatttttttttgtgccatccctgttttgtgtctcactgctattacataggaatggtgatgtattctttaaaattttttttaagattaaacattcactaaagtagagaatagtaggacagactcccatgtatccctcactcagctttaacagtgatcagccttccattcttgtttgccaagattttttgagactatattttcagagttttttctctttcaagttgcagttatgtatcctttctacagtaacaatatgtatttaaacaaaactaggtcacataaacccataggatctaactctgttttaggaagtggagcgagaaatctcattcagaacagagtgtggcctgtattactcctactacaagcagatgctgcaggctccaaccctcgtgcaaggtaattacaactgatagtttcatttggggtctcctgcatttttttcaatattttagtgagaagtactgtgcactaaaaaccacttaaatgctctctagaacatgtgtatttttccgtgctaatgtctaatcatttcatgaaaatgttttttgctctggaagaagttatgtaatactttatataaccctcctctctttgccttccagctctgttccatcccaaaagtaatatctttgcaatttcatggttttgttgctgaattttctcatgatcattttggaggaggtctttgcaggtgaaaggagtattgtctgagaacaggaggcattttggtaacacaaatgaaaattacagttgtgcctcttgtccccagtgctccattcattcctttatttcacagttgccattttcctgcatttttacttcccctaagtgggttagaccccacactctgcctttactccatctaatgaaagccccaacatggatctcttctacctagtacatacttgatcggcttagcatgagtgcatgtgacagaaaactgctcttttataggctttatttggagtcagctttgacatttttggtggcagttattcataaattatttttttgctgttgtttttgagacagggtctcactctgtcgtccaggctggagtgcagtgatatgatcatagctcgctgtagtctcaatctcccagcctcaagcagtcctcctgcctcagcctctcaagtagctgggactatgggtgtgcactaccacgttcattttttgttttgttttgtttctctgtggagacgaagtctcactgtgttgcccaggctggtctcaaactcctgagctcaagtgatcctcctgcctcagcctcccagtgtgttggaattataggcatgagccaccgcgcccagcccataagtgatgttttttacttgtagttttatcacctaggagacatgacattttggttatctttggttttgtgccataaaaattaatgagttggtccctgtgatgatagccagattcatccataataagggtaattaatcaccagcccttcgcttagtggttttagcagccattgatgattatcgtctgtagttcttatttcagaggggatgcaaattagtgaccttctaattctgtcattcctccttatttattagttggaactatgttatatagaaaaccttctcgttaattgtttggctaccttgcagtacagtttatacaagaaaagcaggcttagtattcattttttccccatacaatcaaaccttgttattcacagattccatagttgcaaaatcttttacttcctaaaatgtacttataaccctaaaatcagcattaatagtactttcacagtcattcatggacacgtccagagcaacagaatactttagcctctggcatgcgtgtttcccacagagactgaatgaggcgacactctgcctccttgtctcggctctcacactgcagtgtccttttcagaaagtctgttttatgccatgtcctttgcattgttttgctgtttgttgaagtttaaaatgatcctctgagcctgggcgcagtggctcactcctgtagtcccagcactttgggaggccgaggcggatggatcacctgaggtcgggagttcgagaccagcttgaccaacatggagaaaccccatctctactaaaaatacaaaaaaattagccgggcgtagtggcgcatgcctgtaattccagctactccggaggctgaggcaggagaatcgcttaaacctgggaggtggaggttgcggtgagccgagatcacgctactgcactccagcctgggcgacagagcgagactccgtctcaaaatagaaaagtaaaaaaattaactaattaattaaaacacgacagactcttaaatggcagaaatttattttctcacaattcaggaggctggaagtctgaggttagggagccacatggtcaggttctagggagggctctcttcctggcttgcagacagccaccttcttgctgtgtccttacatggcagaaagagaagagcgagttctctggtgtctcttcttgtaaggccactaatcccatcatgagggcccataactgtccaactcttaggttggagagttatccatccataacactcctgtgttagactttaggcttgccataatgtaataccacagactgcgtggcttaaacaacagagatttttctctcccttttggaggctagaagtccaagatccacctgctgttaggattggtttctattgaggcctctcttcctggctttgtagatgcccttttgttgctgtgtcctcacatagcctttccctctgtgcaaatgcagagagagcacaagggcaagctcttgtctgttcctcttataagaacaccagtcctatcagattaagaccccacccatgtgacctcacttaccctttattacctcctgtaggccctgtctccaagaacagtcatattagggcttcgggcttcagcatacaaatttgtgggggacacatttcagtccacagcacctcctattgaggaacatctgggttgttttggatcaatcttttgctggtacaaatggtgctgcatgagtgaccttgtgccaatgtcattttgtatttttgccagcctttgtgtgggattgattcctagacatgggctttctaggtcaaagggtaaattcatatgtgattttgctggatactgcaaaattcctctccatagagatgacaccattttgtattcccaactgtagtatataggagtctacttttttataatctcacagagtgtattgtaaaactttttttgccaaggcagtaggtgagaactagcatccctcagggtagttttaatttgcactgttttaataggagcaaggttgaggatcttctcctgtgtggaaggactgtgtgcatgttttcttctgtgaactatccattcatgccttggattaattagcctggttacagtgacagaggacctctgtggctgtggatctctgtaacagcaggtcaagttctccttcatccttctcatgacatgtctgctgtgagggagctgcagctctggtctgcccccaacatctgcgcattcaagccctatttggaatgtgccagtgtcatggcagagggcaagagcaagagctggtagaaacatgccttgtcttctaaagcctctgctcagctatggcttacatccacttacatgccactggttagagcacatggccaaagccgttctggggagtggagaaggaaggccatgtatactctcccaaaggagatactgcaggttgcatggcaggagggcagggtggagaaatgtgaaatcctcttgcccacatttctagagaaggaccttgtggtggtggtggtggtggtttcattccagttacaaaagttttaatttacctatgtttgtgtaaatgtttaaatgatgtccatcgaatatgtggtaagctctttgagggcaggagtatgttttttttgcttactcttatatccccaatgcctaccacagtctctagcacttactaaacaatctgtgcatagttttgaatgaatgaataattatgagtgtaattattttcttcctgacttttcacatatctataggttttcatggcctaatatatgataataaaactgaatctatgaagacaattaacctccttcagcgaatgaatatttaccaagaggtttttctcagtattttatatagagttctacccatacaggtatgttttgtgatattgaattattaatatcagatgaaagtcaaagtctgccattttgaactgaaagttatcacatcgttctttctgatcttcaactggtttagtagaaaatcagcaatactatattttttttccatgtatattatgaactttataagatactgctttttatttacataggatataaggtttttgtacacagatgcttcctggcttatgtatgtatgcggtctagaagctaataaatattttcatttgctctctgtaatcaggagtgattacacattcactcctgatggatctttgagagaaaaaatttgtaaagtcagcaaatcacaatgaccacttctcatgtgaatgacgtatcatcagacaaagttaggtataaaactttctagagtaaagagtgaagccagacctgtcacggacttccttcccctgtctcttctcggtggtgggaagaaaggctacccgaacgcttctctaatagatgaaaggggtgtgggcttgctgcttggaattagaggcaagctcctgcatattgtattcctactgtcatgttttaaatggcactgaggagggttagggctcacctgacaaacatgttttattgttcccttttacagaaatatttagagccagtttatttttatatttacaccttatttgggctccaggcgatctatgtcacagctctctacataaccagctggctactcagtggtacatggctgtcaggactgttggcagctttctggtatgtcacaaataggtgagttggagtcagtatgcttcttttttttccaaaatgtaagtaaaaatgaagtcacttcatttccagctcagagaaatttcttctgccacatttgtttggttgggagcagtttctctttggtttgcctggtggtttactcaatttttcttatttagttagggagaaagtgctacttacatgtaattccagctgaggaacagagagcattgaattgcatatcaagaaaatcattcataataatcccaaacctattatctgtttgctgggtgatcaagatttctccagccgcatatctcatctcttaaagggtttttttaaattggcaaataataattatacatattcatgggctacatagtgatatttcaatacatatagaatgtatagtgatcagatcaaggtaattaacgtatcagtcattaaaaagttttttgggtttttttcttgctgttttttaaagccaatgaagacttttaaaatttttatttatttaggggttgtttttgttttttgtagagacaggatctccctatgttgcccaggctggtcttgaactcctggcttcaagcagtcctcccaccttggcctcccaaagtatcaagattacaggcatgagctactgtgccttgcctaaaaagttttaattatatcttcactatcaaccttaatagggttgtgtatggctctcagttagtagagcttaaagataaaatgcaagggcgtttttgccttatttaatatctactattataagcagtagagccttatgaaatcacattttaaaaaaatgtattcaagatcattaaattattgcctgtcctataatggcaataccagtattcaataggagtcttaaaacttgaacatgagttctaatacaggttttattttgtaagtctaagcaaattacgtgttatgacagtcctgttgggggtttactgtatgccaagcactttacaatatgtgttatatgggttcttagaagaaccctatagagtagatattattattatccccattttagaaatgataaaattgaggctttaaaggttacattttgtatatagatacagatattacagacatctatatatatttcttttatatagagatatatgtagatatagatacattgtttgatacattgtttcatatatatctctatcttttatagagagatatatgtagatataggtaccttgtttgagatgtagatacacacacgtatattatgtgttacataagtgtatcatttattgaatgcctagtatgtgtggggatggtgtacaaagatgaaaaattttacccatacttgccctgttgggattcacattctagagaggcaggaagtttttttaaaaaatactgtcaatgacatatttaagactcaagtataaaaaacaccaaagaaatacagagagagggaaaatgtgtattgcctcttgacactaataaagtgagggagaaatgaaagtaagggtttggcatgatacatttgtgagtttaggagtaaggctaacctgggcttgaaccctaggtgctaagggcatacccatggacagagcacttaaatgttctctatgccaattttatgttacagggatgatgatgatgatgatgatgatgatgataaggacaattattgagaaccagtggccagaatcttaagtatacttgtccttaatgtaatatatctttcgttgaggaagtcttcgaggaaattattgtaaaaactatcactttggccatttgtgttttcttttgtgcagaatagataccacaagagttgagtttaccatcccactgagggagaactgggcgctgccattctttgcaattcagatagcagcaattacatatttcctgagaccaaacttacagcctctttctgaagtaagtgtttataaaatttcatatattttaatcccccaattttatatatgaagcttcaaaaaatgtgatgtgcttagtatcccaatgcatgtgaatagttcttattccatgaccaatttttaaacttgagttaaattaagttttcttttcgtgagcttttttctactttgcaaagaaaatgttttcatttttgatgttaaaaatgtactctacataatctacccttaaatagttgcagcaaacccacacacaatttctgcaaactgtcagaatttttaagcccttgctcttgagatgtgatttggtgcattatcgcctccataatagtgtggaatacacacaccgtatgtgaatatttatatgcaaagtgtcactttatgatagttagagcttaaataacaaatgcaagggttttcagagcaacagtttatggtttttctgtttggtttatagagatactggctgctcttgagaaaacttgtctgcaaggttttttattactagagacatgtaaattatacaaaggttttctttttacagaggctgacacttcttgccattttcatatcaacttttctctttagtctgacatggcaatttaatcaatttatgatgctgatgcaagcattagtgctgttcacactggactccctggacatgctgccagcagtgaaggtgagctttgctttcttttctcacttgagattttggccatttagtgtttttatatcatagaatgagatgaaaatatgcaagtacttatggataaaattgaagctgtttcttagatctgctgtaaatttgctgtggccaattgaagctgagtaatttatgaagcctagtttgaccatcttaacttttattcgcttattttaagttaaaaaatggaatggattttattttggggcataaatgcctaggtcaattgttatttatagagatgacttaaattttaaaatataagatagctcttttaaaatgtcttactgtgtactgccacttttaaaaaagaaatcaataggtatataacagcttttttgtagtactttataaaattttcatagtcacatttaactaatatgggatgtgaatccctgttgactggctgaaagtcacatgtgaaataaagaaaccagtatctgtctcctaatgtctgctgctgtcatttaatcacattttttcatgtgcaaaaatatgattttatgtattgcgtacagttttaaaatggcttatagttagtattctaaagtagtagtaacttaaatatttcccaagtataataaaatactttctccatatctaaggcagcagcatagcccaaggatttgtgctcatttattccatatcaaaggagatccagtaagcttccataactgactgagtctgaattaagaaacataaaagtctaccaagaaatacacattgcctgtctactgagacactgtaatagaatgggcactacagaaaatgccaatatgtgtaattcattgtcatagccacagtttgccttttagcttgggaaacaaagatcacagacaacaagaacaagcagacaaatgatagctgctaattagcaatactgatatatctaaaagaagaaaagttatttttaggcagagaagtgtttacagaagtaagaagctagaactggaccacctagatcacaagtgagggtagaatttgggtgggatgtcaggggtgggggcagaataggaaggtggaatgcagcaagagcaagtagataggactaagtttatatatgtatatgaaatgtttagtgtttctgcaggtgtgccagtgaccactcctacactgctggtaacctatacactcctataatctttctttagtgtagtttcacagtaggtatcaaaagcctaaaaatgtatttgccttttcaccaacatttctacccctataagtttgtcctaagtaaataatctgccatgttcattttagttgtattgtaataagaaaaagctgggcggaaaagataaaaagaaataaaaaactggaaatgacttgagccaatagcaatagggtatacttaaataaatgatggcatatctatgcaatcaaatattatataaccattagttcccccatatttttttgaaaaagcgaaacatagagaaaatgagtaaaggttctggaaaaatacacagtaaagtatcaacagtcagctacacgattgatgttctgcatattctttttgttctttagatcttttgattttttctgataatgaacatgtgtctctttttttttttttttttctttgagatggagtctcactctgtctcccaggctggagtgcagtggcgcgatcttggctcactacaacctccacctcctgagtttaagcaattctcctgcctcagcctcccaagtagctgggaatacaggtgcatgccaccacacccggctaatatttgtatttttagtagagacagggttttgccatattgcccaggctggtcttgaactcctgacctcaagggatccacctgccttggcctcccaaagtgctgggattataggtgtgagccactgtgcccatctgaacatgtatctcttttaaaattagaaagcaaaggtactgttttggctcacatacacaacattttaaaataatatagctaattgattttttatttagttctaaactttgttcaacttttacatttgaaactgtgttggtattagaagtagttttaagtatcagactttaaggaggaacattattacaatgaaaggatcctgagttataaaactaaattgctgctgtcaggtctgaaaataactggctctttcagcttaggcaagtgatttaacttagtttcttcataaattagaatcacttctctctaaccatgtcaaatgggaaagagtcagaataattggtatagaaaaaggtaatacaaattcagagctcagtgtggtgacaagaagcagtaccttctacagtacattttgtcatcttttcatgaatgatgaaactcttaccagcaaaacctcaagtttccagtcagaaatgtgaacagagtaaaacagaacagcaagcatattataaagtgtatacttttgcttaattaaaggctaaaatatggaggttaataaagttttcttaatctattgtggaaacagacgcattcatgataaatgcttaagagatcatgttaagtaccctacatggttccagacaagagggagtagagacatttctccccgttcctccccaaagtacattgaaaaaccttagacagtatatgtatataacaaacataagaggaatttgagaggtagagagaagcagactgcctagggaccttgcgaccagagggaaaatttgacagcgagtttcttgggttttctttttgccccatatatccttgactgggtgctggagaagtcagaaacctgggaataacaatggactcaaacaaaaagcctcctccctctagcaaaaggaccagaagagaggaagcctaacaagacagaaaactttcaaacattaactgccttattctagcgaaatgctacagaagcaaaaccacagctccactcccacctccatcagtaaagttcagtgggaagcctagattcctaccctcacctagctgtcactaggcatgccttgcttcctgccagagctatgtcagagaagtctagtggggaaccagaactttcaccatctcccagagacatctgtgaaggccacttgggaaacttggacttcaactctcactcagtggtaatgagacatcctgtcccctctctatcaggatggtgtcagagaaggtcaacagggaggttgagactctaaccaccacccagatgtaataagcctttctctactgccctaccccatgctgtcggtgcaggccatgtagggagcagtggtgacgcacctctgtttctcccagccagcatgtgtcagcagggacctgtagagagcctgaactttcgccttcacccagcaataaggaagtacaccttctgctgacccccagatgtcagtggagggcaagtgggcaccttggacttccatttccgtctgaaagtactgaggcagcacccttctttccccattagcatagcgttggcatagtttgaatgtttttgtggtcccccaccaaatttatatgttgaaacccaaatccccaaggtgattgtattaggaggtaggtagggccttttagaaggtgattagtgccattataaaacaggcacaagggagctgtttcacccctttcaccatgtgaggaggacacagcaagaaagtgccatcagtgaaccaggaaataagccctcaccagccactgaatctgccagttccttgatcttggacttgccagcctccggaactatgagaagtaacttttttgttgtttataagctacccagattacggtattttgttagataacagcctaaatggaccaagacacatggtgtcacaggaggcctgctaacatggcagatttaaataagatccagggtcccataatgtaataggatacagttaaaaatcacttcttaggccgagcgcagtggctcatgcctgtaatctcagccctttgggaggccaaggcaggcagatatttgaagtcagtttgagatcagcccgggcaacatggtgaaaccccgtcactactaaaaatacaaaaattaactggctgtggtggcatgtgcctgtaatcacagctattcaggaggctgaggcaggagaatagcttgagcgagccaagatggggccactgcattccagcctgggcaacggagcaagactctgtctcaaaaaaaaaaaaaagaaaaaaaaattcttatattaagaattaggaaaatctctcttgagtgaaaagagacaatcaatagatgctaacactgagatacacagaaattggaattatcttacaaggaatttaaggcagccatcataaaaaaaaagcttcattgagcaattacgaacacacttgaaacaaatgaaaatacaaactctaagcaaagaagtagaagatacaaagaagaagcaagtggaaattttagaacagaaaaattccagtaatcgaagtttaaaactcagtggatggactcaacagcaaaatgaagtagtcagaggaaagaatcagtgaacttgaagatagaacaatttagaaattacctaatctgaacaacaagaaaaaatagaatgaaacaaaaatgaacagagcctcaaggacctgtgagactataatgaaaagtctaacattcaggtaatcagaatcccagaagaagacaagaaaagagtttactgaagctgaaaaaagtatgcaaagaaatactttcggaaaaaatagttgaaatttcctcaaatttggcaaaagctataaaccttcagaatcagcaagctgaactaatatcaaacaggataaatccaaatagagccacactaagacacattataatcaaacttttggagactaaagataaattttaaaaaattgaaagtagtcagaaaaatactgtacctataggggaaaaccaatttaaatgacagtgaattcctcatcaaaatcaaggaggggctgggcacagtgactcacgcctgtaatcccagcacttttggaggctgaggctggtggattgcttgagcccaggagtttgagaccagcctgggcaacatgatgcaaccccatctctataaataataataataataaaatgattagccaggcatggtagcaacgtgcctgaggtctcagatacttgggaggctgaagtgggagaaattgaggcttcagtgaactgtaattgcaccactgcattctaacctgggcaacagagcaagacccagtctcaaaaaaaaaaaaaaaaacaaaaaacaatggaggccaaaaggaagtggcctagtattttcagatgcagaaaaaaagaactgtcaaggctgggtgcagtggctcacgcctgtaatcccattactttgggaggccgaggcagacggatcatggggtcaggagatagagaccatcctggctaacatggtgaaaccctgtctctactaaaaatacaaaaaattagccaggcatggtggcaggcgcttgtagtcccagctacttggtaggctgaggcaggaaaatggcgtgaacctgggaggcggagcttgcagtgagtctagatcgcgccactgcactccagtctgggggacagagcgagacttcatctcaaaaaaaaaaaaaaaaaaaaaccatcaacctacactcctatacctagttaaaatgtccttcaggaatgaaagggaaatcaaaacattctcaattaaggaaactaatattgccagcagtcctaccgtaagagaatagctaaaggaagttgttgaaacagaaaggaaatgataaggaatttaagagcatcagaaaggaagacaaggcaatgaaaaaagtaaaaatgtgaataaatataacagacttttcttattctcttgagtttctaaattacgtttgaggctgggcgtcgtggctcacacctgtaatcccagcactttgggaggacgaggtgggtggatcacctgaggttaggagttcgagaccagcctggccaacatggcgaaaccccatctctactacaaatacaaaaattagccaggtgtgatgatgggtgcctgtaatcccagctactcaggaggctgaggctggagaattgctttgaacctaggaggcggaggttgcagtgagccgagattgtgccattgcactccagcctgggagacgagtgaaacttcgtctcaaaaaaaaaaaattatatttgatagctgaagcaaaaattataacactgtcttatgtggttctctatatgtaaaagaaatactttaacaatataaatgggaagggtaatgagacttaaatggaggttagggttctatgcctcactcaaacagttaaaatgtctataccactagtccgtaataagttattaatgcataatgtaatagccagaataaccactttaaaaaactatacgaagcagtacatgaaaaaacagtacagataaataaaaatgaaattgtaaaaatgttcaggtaacctacaggaaggcaggaagaaggaagcaggaattagaagcaagcaaacaaaaaagaataaaagagcagatttaagactaaaatagcaataattacattaaaggtaaatgatctaaatatactaattaaagagatggcagggtggatttaaaaagcatgacccagctgttgtctaaaacacacttcaaacacaacaatatagataaattgaaagtaagaggatggaaaaagatacaacatgcaagtatcaatcaaaagaaaggagtagctatgttaatatcagagaaagtagatatcagagcaaagaaaattactagggacagaacagaacattatataatgataaaacgttcaatgtaccaagaagaaatagcaatcctaagtgtacctgcaccaaacaacagtactgcaacgtgtgtggggcaaaaactgacagaactgaaaggagaaatagaaaaattcacaatcgcagtttgagacttcagcacatctctctggacaattgatagaacaccagacagaaaatcatcagagatatagaacccaacaacaccttcaaccgacagaatctaatgatcatttatagaaactccacccagtaacagcagaatactcattcttttcaagcattcacagaatacttaccaacagactatctcccgagccataaaacaacgacaaacataaaagaattaggattatagagaatataatctctgactgcaatggattcaaatttgaaatcaatacagaaagataacaggaaatgtttcaatacttgggaattaagctcactattacatctatagtagtaatagccagaataaccactttaaaaatatataaagatatacactaaaaaagagtctaagaggaacctcggagagcattgaactcaatgaaaatgaaagtgaagcatgtttaaatttgtgggacacatccaaagcagtattaagaagaaaatgtgtagcactaaaaagcttatattagaaaagacagaaagtctgaaatcggtcatccaagctctcaccttaaaaaagggagcaaaataaattcaagccaggagaagaaaataataaagagcagaaatcaatgctattgaaaacatgaataatagaattaattaaaaagagctagcttggtcgggcacggtggctctgcctataatcccagcactttgggaggctgaggcaggtggatcacctgaggtcaggagtttgagaccagtctgggcaacatggtgaaaccctgtctctactaaaaatagaaaaattagctgaccgtggtggtgggtacctgtaatcccagctacttgggaggctgagcaggagaatcacttgaatccagtaggcgaaggttgcagtgagctgagactgcaccattgcaccccagcctgggcaatgagagcgaaactccgtctcattcatagatagatagatagatagatagatagatagatagatagatagatagatagatagattagataagatactccatctcattcatagatagatagattagatagatagatagatagatagatagatagatagatagatagagctggctctttgaaagattagtaaaattgcgaaccttctccataattaccttggaacattaaaaacttttcaatcttaacagactttgaaagttctgatctcaggaagagtgggaggtgggtgggtgttgagtgcttaatggatataattcacattgagtgatagatacacgaaaagcccagacttcatcagtatatgttatgtacgtgtaacgaaaccgtacttatatcccttaaatttacacaaataaaatgtgtaaaacaaagttttgagcctctgtggtactatttacgtggtagccaatattgcatagtggttaagaacacagactctacaactaggctgcctaagtttgaatgagtcatatgtgggtcgtatggaacaatgcttgctattttattaatgttaaacagatattaactgtggttattatgaatggtgatgaggagcatggacacgatccattgaagacagctgtagttattctacacagaaaggatatacagttgacccttaaacaacacaggggctactggtgccgatgtctccccccagcagttgaaaatctgcacacaatttttgactccccaaaaactcaatcgctagtagcctactgttgaccagaagccttaccaataacatagttgattaacagatattttgtatgtgatgcattatatactatattcttattataaagtaagctagagaaagggaaatgttaattaaatccaaaggaagagaaaatatacttactgtttattaagtggaagtggatcatcacaaaggtcttcatcctcatcttcacattgagtaggccaaggacgaggtacaggaggggttagtcttactgtctcgggagtagcagaggcagaagaaaatctatgtataattggacttgtgttgtttaggggtcaactatattcttgctgccttgtttctatactgtactgtactaatagaactgggaaagaatatccagtacaccgctgataatccaggacttcctaatacacagtactgctcaattttacatttttggctgttcatcagcaatttttcttttgaatgtatataaaactatacaatcttgttgttacacaaactgcccctttttctagaaatactctcacttgatataaaaagaactgtaaacatcaaaaaacacccacaaataaaggcaaccagaaagatgtttttggaaaaaaagcatttgtaaatgagttagtatccttaagagttcctgcaaatccatgagaaaaccatttataaaccaatgagaaaagggaacaaaggatacaaacacttcctagaaagaagagcatcaaaaagggtcaaatgcataggtacaaatgtaacacaaagtgacaatttacgctttacaaaacaccacaaagcattgttgaaagttttaaacgcctagattggaaagataattcacgttcttggattggaatacttactgttgttaagatggcagtgccccccaaattgatctacagattcaacacattccctctcagaatcccaggaggagtttttgcagaaattgacaagctaatcctgaaattcatatggaaactcaggggactcagaatagctacaacaatcttgaaaaagaagagtaaagttggaagactcacactttccaattacaaaacttactgcaaagctatagtaatcaggacagtgtgatactagcagaagaattgacataaacccatggaatagaattgagagagagaaataaacctgcacaagaaatggtcaattaattttcaacaagggtgtgaagataactaaatggagaattaatggtgttttcaacaaatggtgcaggaataactgataccgacatgcaaaagaatgaagttgagccccttcctctcactgtacacactaactcaaagtgaatcacagacctaagtgtaagagctaaaaccaaaacttttagaagaaaacatagtaataactcttcctgaccttggagtagcacaaaccttagatacaataccaaaagcacaagtgacttttacaaaaacagattaattggacttcatcaaaattaaaactgttgtactcaaaagtgtgctattaggaaagtaaaaagacaacccatagaacgagagagaatatttgcaatcatatatctgatcaggaactcccagaatatatgaagaactcttataactctttcaatgataaaatagcaaaggatttgggtagatatttctccaggtaagatacataaatgtccaataaacacaggaaaagatgctcagcgtcattagctatcagagaaatgcaaatcaaaaccacaagcagataccactttacacccacttggatggctaaaattaaaaaacagagacaaatgtcgcggatgtgaagaaatcagaactctcatacattgatgatgatgggattataagatggtgtagtcactttgaaaaacagcatttcctcagcatttcttgattttaatatagagttaccatatgatttagcaatcccactcctagatacatacccaagagaaatgaaaacatatccatgcaaaaatgtttgtatatgaatattcatagcagtgtgattcatagctacaaagtggaaaccacccgaatgcccatatcccttccataaacagtgtagtccggctgtgcaataaatagtgttcagcaataaaaaagaatgttgatacatggtgcaacatggatgaaacttgagaacaccatgctaagtaagagaagatagctaaaaagactgcactttattccatttctgtgaaatgtccagaatatgcaaatctgtagagaacagtacatcagtggttgccggagctgggggtaggggatgatggagagtgatggctagtggatatgggtttctttcgaagtgatgagaatgtcataaaattagactgaggtgagagttgcacaactctatgaatataccaaaaatcatgaagcacactttaaatgggtgaatttgatggtatatgaattatatcaactaataaaactgctaagaaggaaaaactcttccttctctaaccagtagttgtactcagggatctatccctaaggaaatgtttttattcatcagttcctccaatgtttattaagtgccgctcttctagtgtgtattctttaaggtgctggggatacagcagtgaacaaaatatgtaactaatcagacaattcggttaggaattctgagaatcagacctgaaaaaaatttttaaagagatgttcacaatgttaataaaaagccagaaacacctaaatggtccagtggcaaacaaattatggcatatggtggaatgttacataaccatttaaaatttaagttttcacagaatagtcactgatgtgagaaagtgatatggtaggatgtgaaggatgtaaaatcctgtatatgaaatactatatactgctgtgaaatcaatattatttctttaggtaatggtgctgggttttgactcaagagcccacctattgattgctatttcttttttgtgtttttctgaagtgtctaactctcctagagtaagatacattatctttatgatcctaaagatcatcagcatccatttccctgagttcccattgacactaagcaaaagcactgaactgctgcaagcctcacttttcaatgcttctatcaataggtttgtttcccttgaggttaagagaacaaaaccatggggataatcggatttgctgctaaataaaacgtatttttcacttgtcagaatgagtatggcattgtctaatttgaaagagaagaagaaaactaacagaataagtgtccactctttattagggactgccttttttttctttgtggcgtgtttcgtgtattcaagttagttgtgttttgcttcttttggtatcaacctatcaataagtttcattacatcaagagttaatccttagtgctcattatgtgccaggcatttcctccccacccacgcctccccactttttttagagaccaggtcttgctctgttgcccaggctggaatggagtggagcgatcatagcttactgcagcctcaacctcctggactcaagtgatcctcccacctcagcctcctgagtagctgggactacttgcaccactacacctggctagtgttttatttttatagagacacggtctcgctatgttgcccaggctggtcttgaactgggctcaagcaatccttctgtctcagcttcccaagatgttgggattacaggcattagccaccgtgcttggccaccaggcattttcatccattaccatgtctggttcttctgtgagaccctacatcaactctgtgaggaaggtatcatcatctcttgttcacgatgaaccatttaggtcacatagctggtttgcaccagaatcggaactgcagtacaggtgctgttggtgccggagctgatgtcattgcccagtgtactgtgctgcctgctatgaagctgtgaggtcaaagaggacaaggtcatgcagcaggaggggtttgcagtctaatcaggggatctgggcacacactcacacagacaaagcaaggaatgatacagtcctaaagtatagagtatggaaaactaggaaataacacagtaaagtacttattggtggtcataaacagtaactgaaatcattgaaaagaaaactgaagattataaatggcccttgccaattcccaggaataaatacattctgctgttgtttacttcctctacttcatatcatccctctttacttcccctttaattaatgttagaagatttctgttattaaaaggtaaataaacagttggtatgtgtatgatttagtttccttttttagattgtgtttctttttttggagtctcactctgtcgcccaggctggagtgtagtggcgcattctcggctcactgcagcctctgcctcccaggctcaagcgattctcctgtctcagcctccgaaatagctgggatcacaggcacgagccaccacgcctagctaatttttttttttttttttgtatttttaatagagatggggtttcaccatgttggccaggctggtcttgaactcctgacctcaggtgatcccacccgcctcggcctcccagagtgctgagattacagatgtgagccaccgcgcctggcctagattgtgtttcttgaatctacatgtgttttctgcattatttgtaagctgaggtgtatccacctcatgaccaacatgtcgacatgtgatgatctcttggtaaaatgtctgtactcatctaatctttggttcttgcaggcgacatggctgtatggaatacagataacaagtttactcctggtctgcattcttcagttttttaattccatgattcttggatcactgcttatcagttttaacctttcagtattcattgcaagaaaacttcaggtaggactttttttttgtcctttatcaaagtaaacttttttttaattgcgtggtttattgaaccttattttcacacagcatacaaagggaaatttacaacctgatttgcactaaaaagagcacgtggcattgtgtgctttttcttgtgcatgtggtagcatttctgtttcaagctttctgggtcatccttttattttgacagttatttcttagagaattggaaccttaccttcaatgtggggatcagccaaagatgcttggttgaatgccactgatttaaaattgaagtaaaagagaaaagttattaatttttatgtgtgtgaactcaggagcgagaagagtctcctgcttgtgttgggagcgtgttcattacagtccttcacgttggtggataccctgttatttgatgtagtaatgctactcttttccccatccttccataccatactagttatttttaggtgaattaaaattaactgttttgagaattttgagaatccaaataaataactttagaaataatgggacatttcctagggtattgtcaaatcatgtttgaaaacaatgacttgctcttttagctttatttatataattaaatttcttatatttacataagatatgagtcatttgtttttgcttaaaattacaacatcctgtttcacatatgctagaaacttccgtgtcaagaagccattttgttttccacttttagaagaagaaatcatttttcttattagtcttttgagtgagaattgttatggacaaaggtttttagttgactatcaaaaacaacagttcacagtcatccttttaaccttaattataaatattactcgtatttgaactgttaagatattattatatttaacaatgtataaaattatcaagattataagaaaactattatatgtcaaaaggcacaatgtacttctttttacacccataagtcttttatgtaattgacttgtaactatgcccgtggtgtaggaattaatggataaaagatgtaacagggccaggcgtggtggctcacacctgtaatcccagcgctttgggaggccaaggctggcagatcacgaggtcaggaaattgagaccatgctggctaacatggtgaaaccctgtctctactaaaaatacaaaaacttagccgggtgttgtggcaggcgcctgtagtcccagctactcgggaggctgaggcaggagaatggcatgaacccaggaggcggagcttgcagtgagcggagattgctctgctgccctccagcctgggcagcagagtgagactccgtctcaaaagaaaaagaaaaaaagaaaaagatgtaacagtttgttcagtcagcgtatcctgagtaccttccaaatggcagaccccaatcctcctgtttctaaggtctgaaaaaataattaggaaaaaaaagactaggacacatttcctcatcgtatgaagctcattattaagtgattcatttactactagaaaatcacaaatattaagacagtgtaacctcatgaaaatgagtaggttgtattttccacatatattttccctttatgttatatgagccagtgtttttaaatccttaagtaagctcatcttcagtgtttatgaagttatattaaaacttaagaattaaaacataactcttttaatttctagaaaaatctgaaaactggaagcttccttaataggcttgggaaacttttgttacatttatttatggttttatgtttgacactttttctcaacaacataattaaggtaagttaataaaaatgacatgtttaatgtatttttaattaacttatggcattggagataatttttgaaactttctttttcttttttaataaactaattgttttagagacagggtcttgccgtttcctaggctggccttgaacacctggtctcagatggccctcccaccttagcctcccaagttgccgggactacaagtgtgcaccaccacacctggcttctttgaaacttttaattttaaataaattcttgctttataaagtgtattaacgtgactcaagagttaccagttttacttcaaacaggctcagttttaactttgtcttagtagcaaggattattttgttgattttagtcattaatttctatgtactcttatgtcccaccttgaacttactcaccttttgttatgaaacttttaaaagcttaacttaaaaagcattaaacaaataatttctctaaatttaaaatttttatttttagtaccgtaatatacacgtagctttctgtactgtggtacttaaaaaaaaaagacatgatttttaattgagttcagttaataagtaaagtggccttactatctactttctgctggaaagaagagttgagctcatttttcccaacatttaactgacttatatgcaacaggcctaacagaacaactcatttggtaacgtaggcatccattggttttatgtccagtaggtgctttgctaagatttttacaatgccccaggggctctgcttagtttaacatgctttttaaatgtttttattggcgttttaattttttttcagggtaggctttattaaaggtataattcttggaccttgatatcccatttgtttttatgctagagcaaaactacattggtatcttcagatacttttgcctgtcctagaaggttggtctcaggataggaggcatctgcaaaacaggctccttctccacaagagaactgtggtccttgttcacgtctgttgactatcaaagaaaaaaaagactcttcactcagccagtcactatgtcactatgttctttttttttttttttttttttggacagggtctctcacccagactggaatgcactggtgtggtcatggctcactgcagcctcgatctcctggatttaggtgatcctcccacctcagcctcctgagtagctaggactatgtgtgtataccaccacaccggctaatttttgtattttttgtagagacaaggttttgctgtgttgcccaggctggtcttaaactcctaggctcaagcagtccacctgccttggcctcccaaaggattgtaggcgtgaaccaccatgcccagctgtcagtatgttcttaaactccatacagtcaagtacttatcaataatttatttttaaatttctaaattttttttgctttttttttttgagacaggatctcactgtgccacccaggctggagtacagtggcacgatcttggctcacggcagtcttgacctcctgggctcaagcaatccttccacttcagcctgagtagctgggactacaggtgtgtgccaccgcccctggctaattttcacaatttttgtagagatgggatcttgtcatgttgcccaggctggtctcaaacacctgggctcaaggtatgctcccacttcagcctcccacagtgctaggattacagacacgagctgctgcactcagccaaaagctttttttgagttgatgaataccccatttatcctgatggaattattacacactatatgcctgtgtcaaaatatctcatatactccataaatatatacacctatatgcccacaaaaattaaaaattaaaaagcctattcaaagccaggtgtggtggcttatgcctgtaatcgcagcattttgggaggctgaggtgggaggatcgcctgaggctaggagttcaaaaccatcctgggaaatgtagcaaaatctaaactctactaaaaaaatttttttcaaaacttgagtggagcagccaacatttctggaagagtggccaaagatacacagttcttgcattggcccactctacacattcagtgacctgttcttggattaaaccagtaaagagctgcatccctggaccaccattttttgactccccgaagaataacatctgttgaattgcatttgatgttttgccagtgacctacaacaagaggaagtagagaaaattttccttgaaagtccttgctgtttttgctttacccatgggaaaaaattattttgagtctcagttctaggactgttaagatctcttccgagcaactgttttgttttactcttataaacccgtgagtaacataaatatgttgacctccctgtttgcatttgctgctggaatgcaaaagaccagatttgtggctcatctctaatgaatatattgtgtgtactgaactcaattttagcttcatcttttctccctgtcttcatttttcttctaataaattttttcaccatttatgttattatatatggatttttaagccacaaatttaaaatagaattatatgagttaaaattgtaatcactaatgatgaacactcatatttgtctgtccaccccttcagggttacaactgtcttgaattgtctttgagtgaataagtcttggatcaattgtatccacagaccaaaagccccaaagccagacaggctttgtgggcggtgtatctatttgaggtttcagatcatcgtcttgtcagttttctggtctgaaaacttatgcacactatgcctcagccttctccctctccctgaaaccaaaaaatctcatcttttacctattttgcatatttaacttatgtataagatgttttttgaataaaggattatgctaaaaaggggagtggggtttggaaggagtttggaagtccctgctttggaattcctcagttctgagaactactgtgaacatttactgattttgtacacccacacgctcctgtgaaattggacactgaatatgtaaattcaatgggaagttatcaggaaaccgtgcctaaaggactaatagcaatttttgttttctctttccccgatagaaaattcttaacctgaagtcagatgaacacatatttaaatttctgaaggcaaaatttgggcttggagcaacaaggtataactgaattgaaagtctatgtttgctattttctattgaatcagcagggactttaaaacttaagttgtcattgtgccttcaactattaattgcagactccctctgaggaaagatgcaatgtcatttctttgtcttatattgaatttaatactttgctttccatttgttccctagggattttgatgcaaatctctatctgtgtgaagaagcttttggcctcctgccttttaatacatttggaaggctttcagatactctgcttttttatgcttacatattcgttctgtccatcacagtgattgtagcattcgttgttgcctttcataatctcaggtatggtatatttcagaaatctaatgctctcctttaatgaacttgttccatgttgcagaaaaattgcaaagttgaaagtcagaatatcagacacaagtaatagtattcatcttaaagggggaacatacctcgtttagagtggactacactcccagtagttaggagacaacagagtaatgatcagattgcatgcggtctgggcttaagtcttggcctgcacacttgggaacaaagtgactcttgagccagttacataaccttttgatatgtccatttccttatctttagaatgggaagactaagagtacttactctacaggatatttgagaaataagtaaaaacaacataaagcacttaaaatagtgtctggtgcctagacttcggcaggtacaagccatcgtgaactggtttcattatcactgttgactcataagcctctgttgtgtttccattattagcatcctgtgtttttctcccttcctcctctagctgcttttttgtattgctcttgaaatgtaagagttaattaattattgctcatttgttttcttgcatcttgcttcagggctcataatgttggagtggaccataattattagtatctactaaaagttttgagtaataactgccaattttaaaaaactaagtatatctaccaatctactgaaagaaaaaaatcaggagtatgaaggctttttaaaaacttgtaagaatatctacccatcaagctgctgggggggtttgcattgactcttcgtgttaaactgaaagaaaattaagtgtaagaagttgaagctgctgtcatttgtgaaaacttaatgaagctcacgaggaagccctttttctgtagttaccttgccaattaatgtgctggtgaactgtgattcacagccacgagagagctgtcattaaaatgagtccagagcagttgagaggttttatgatcattaagaatgaaacaacattgaaccatgaaaatatttcattgaacataaactattttactatccttgagaagtgttctttttcatacctaacccaagataaaatttagccctgtgaaaatagatggaaattattctggacagtgtgatttaatatcattccagacatagcaagtgtcaacaggactctggactgcatacaaagcaggaagttcagtgggcctgcagtatcttcctgaaaatgtctgccatgctctgtgtgaatctatgagccatctctggaggctgattgggtatatgatcatagataaaagattttagagcatcttcatctgccagatagggatattaggactttattagaggaaaagcactacatgaaagtaattaaagaatcatagtccagtcatgtcacttaacaagggggatatgttctgagaaatgcatattaggcgattttatcattgtgcgaatatcatacagtatacttacacaaacatagatagtatggcctactacacacctaggttatgtggtataacctactgcatctaggctgcaaacctggacagcaagttactatgtttaatactgtaggcagttgtaacacaatggtaagtatttgtgtaactaaatatatctaaacatagaataggtacagtaaaaatataaaggccaggtatggtgggcctgtaatcccagtgctttgggaggttgagaaggattgcttaaggctaggagttctagaccagcctgggcaacatagcaagaccgcatctctacggaaaaaaaaaagaaaaagaaaaattagccaggcacgatggtgcaaacctgtagtgctaacaagtcgggaggctaaggcgggaggatcacttgagcccaggcgtttgaggtttcagtgaactataattgcaccattgcactctaccctgggtaacagagtgagaccctatctctatttttaaaaaatactgtaataaaagattaaacattgtatacctatatagggcagttttcataaatggagcttgcaggactggaagtttttctgtgtgagcctgtgagtgaatgtgaaggcctaggatgttaccatacactattgtagactttataaacactgtgcacttaggctacagtaaatctatttaaaaaacaaagtgattgtgctatgaccttataatggctatgatgtcactaggcaataggaatttttcagctccattataatcttacgaatccactgtggtatgtgcgatctgttgttggccaaaatgttatgtggcacgtgactgtctaaatgtgaattaacttttaaataagggccttttgtcagtgccaagtatttaaagtatttctacctttttagtactaggaaggatgatactatgacttgttttgttttgttttgttttgttttgttttgttttgttttgaaatgcatctcgctcttgcctgggctggagtgcagtggtgcaatctcggctcactgcaacctctgccttccgggttcaggcaattctcctgcctcagcctcctaagtagctgggattacaggcatgcacaaccacccctagctaatttttgtatttttagtagaaacagggtttcaccatgttggccaggctggtgttgaactcctgacctcaagtgatctgcctgcctcagcctcccaaaatgttgggatgacaggcatgagccactgcaccctgccagatactatgacttttatgtagacatctgcattagtgtgaggggtacatctgaaaggggcatggtgttccctgcctcagcctcccaaagtgttgggatgacaggcatgagccactgcaccctgccagatactatgacttttatgtagacatctgcattagtgtgaggggtacatctgaaaggggcatggtgttctgtgttcatggaattaatcagagccttccagcttggctgggctatgggggaggtactgcagacttctcttaggtatctagagaggataagagcagatactccccttgtctgttttatttttatttacttttcacaccttgccctgttgatggatattcttatttggagtatcctttttgtaccaatatggaaaccagtgtttgggttgtaatatttacttttaagtaaagattccaattgtgaattaccaatggtgagaactgccttagagtatccttttaattttcgtatgtatttatggtaggaaaaaaaggatttctgggaaataaaaaaagtctctagttacatagagaagcatcgtatgtgcccagttctattgggtatgtatgaagggatcagtagaccttcatgaaagtttcatctttaactagtagcctttactgttgttttcttttcccctcgacaacaaattgtgcaacatctaaagtcactgatcagtcttaacatcactgaagtggagacagccaggcagtgtgtgcttcccggtgtaatgtgatgtggaatagagccgtcctgttttctgtggaaatatgtttcaagtccctcagtggatgcctgaaacctcggatggtttcacaccctttctatactatgtttttttcctatacatatatccctgtgataaagtttaatttataaattaatcatggtaagagaataacaataataataaaatacaacaattatagcaacatgccagcatcacttctcttgcactttggggccttagttatgtaagataagggctgtttgaacacaaacaatacagggacatttaaatgtatcttactttattagtagtttagtagctgaatgtatctgcttgtctgtctcgggtaggtgggtagactatacagcgtggaaacacaggaccaagggatgatgatctgagtctcaggtgggacagacagggatggagagatttcatcatgcaacacagaatagcatgtaattcaaaactatgaatggtttatttctggaattttcaatttaatattttcggacagcagtttcctcaataacaaaccactgaaagtgaatccaccgataagaggggactactgtgcatcataaccccgtgaagtgttcttgccaaaaaaatgaacttgtgtctgataaacctctagatctaattacaagtttacaagaagcatgaaacgtataaccaccactgtgagccacacctgggagacgggaacagcttcaggacatatgttctctattcttccacaaacaaatggcctgttttttaaaaaaaggagatacttttatagatcaaaagatatttaaagatatatattagtgaaatgcaacatgcagttcttagatcctgattcagagaaacctgaaaaaagcaattgatgcaaacagggaaaatagaacatgaactaggtattagatgatgttaaggaattattgttacttttattgggtgtaataattttaatgtagccgtatttggtaaaagtcatcttttggatatcaggaggtattggtaggttaaaaatgtgatttttgaggggtcataaaggaactgaattccaagttaatggatgtgtgttttgcttttgcttatttgtaaaaatttgaaaaatactcataataactggtaaaacatcttttaaaaatctctttcaatttcagcaattccaaaaaatttgagtttttttttttgcattctcttttaatttaaagaattgaagcactttaaatttttacttcaaagctgctgtgaaatttcagtttttctcattattaatgcatttatattgttacactttagcctcataaattcaaaattgatcaatgcgaattcatttcatcttatggaaataatcaatttctgaatacataaaggcatacatttcttgtatcttcttcttttacaaagatctaactaaaattatgtttccagcttaaattttgtatgttgctgttttactcagtgattctacaaatcaacaatccgtgggtaaaatggaaaaaggcacagttgacctgaaaccagaaactgcctacaacttaatacataccattctgtttggattcttggcattgagtacaatgaggtatttttgtcttacctgtttgtttactttttatttgatcactcttgatgttacttagcaatataatttggaaagtgacaatcatcttcattaatgatcatggttcccataaaatcatccttatatcctatcttctctcagtataaaatactcaacatcagtttttacaattaattacaaacacgcctctatgttttactcaaagcatagtcttgaaaaggcagtggagttaaacaacgaacccttcggcaaatggcatctgcatagttttaagtaagattttgccgtcatagactgtaaagctgcctttataggtgtctcagaatccaggtttatatacaactagtacttctgacttgcgcctgtgtctgttcttgcagaatgaagtacctctggacgtcacacatgtgtgtgttcgcatcattcggcctatgtagccctgaaatatgggagttacttctgaagtcagtccatctttataacccaaagagggtcagtgtcatccctttttccatctccttttatgacttgcagtatttctttcataccacttctttttttgtttttcagtagctgtgagataaaatggatactgaaattgaagctgaaaatacataattgatatattaagattttatagggaattattttaaaataattttattttaaaaaattacttttttctcagactataagttagatatgttcattatacagaatttggaaatacaaaaaaaagcacaaaaggggaattaaaattaccaataatccccttgtccggaattataactgttgttattataatgtattttcataaagataattatttatatatgtatgacaatttttcagtagcctataaatgcagttttgaattgttctactccataaattcactaggtggcaatatagtagaagctgcagatatcttacaaatgattagaatcctagtatcgactcagttattctgcatattggagacttgtgctccattaaattatatttctggtaattttttaaggcatatatttacaaagcaaaactgtaaggcagaagtgtttaaaaaagccgggcacagtggctcactcctataatcctagctgctcaggaggctgagacaggaaaatcacttgagcccaagaattccaggccagcctaggcaaacatagcaagaccctgtctctcaaaaaagaaaaggttcaaaatacttataatctaaataatgtctttcttatatagatatgtataatgcgatattcagtaccgatattaatactgctgtatctatgctataaggtaagactgattttcctcattcttgtcattcatgtatttagcagaataattgctttgattcaatatattttgtgtattatttggcaaatagagtggtttgtgaaggttataaatacctccttagcttcttactgaaggtgacattgatgggaaaatggatctttttcccaaatagttttaacaagtaaaaacatgatagcgaaaactactatagcatttaataattctaattaattttgatttagactcttaatattcagctgatgcaaattctgaaaataaggtgttttcagacctattttgaaatgaaagtaggaaaattattttcccattacctgatttatatagactaagagatttttaaatgtatcttactttaagctccatattttattagatgcttatcttcataagagaattagacacataaataaacacagcctaaggctaggctttttaaaatctgttcttcagtatcaataggaagtatctggatttttcatattctcatttgactagtttctgaaacagcatgaactgccctttaattcagagaatttcttatcagagacaatgatcattggtcaggttgactgtggctttttgtcacatctttgacattggcagtcttgaatcatcactagggcagatagcacagactgttttatccaattgagcttctgccctctctttttaaagaacctaacatattaagtttatattttttttcctttaaattttactttaagttaaaacgacggatttcaaactctactgtgtagaacccctgatttgggagggtggctaaaagcaggggtgatgggacctcccgcagagaggatcagctagagcagctcagctttggggtttatttgcttatattttcatgtaggattttgtgaaccaaaggtttcaggctaaagaaaatattgctaaatactatattgtaaatatttcaaaaaaatgtgttctgttatgagcctgtctatcaaaacatttaccattagcaaaactctgtgctaactcctagatattaaaaaacacacaaatagatttatgcctccccacctctgggaattttattgctctaatgcgaataactgaaacttactaaaaacatctagacacgaacagttaaggattaaacagtatatgttactgaggagtcctgtcagtttacctttacacaatgattcagtggattaaagcaccctcctcacagaaaagataaagctcatgaatgtttttctcaccactgaagatgtaccgaacaataaccatctttcatactgcccgtgtgcatgtaggttcagttcttttatgtctcagctatctattgaaattttactgatttttttaagctatttgaggactgaggtgttttgttcgtaataaaattgaggaaggacattgtataagaagtaaactgtcctagggagcattgattcttgaagcgtggtcctcagataaacagcatcagcgtctcttgggatcctgtaaacatgcatgtgtttgggtcccactccagacctaccgaatcagaagcctgggagtccagtacagaaataggcatttaaccagccccccagttttaagaaccccctgctgtagcggtcacagggtttctcagcagtggcacattgacacttgggccagagaattctttgccgctgggggcgggggcggtcctgtgtgctgtaggctgctctgcggcagcttcagcctctgcccgctcattgaagcacgtctcccctggctacaaccaaaaatgtcaccagacattgccaaatgccctggggctggggctaggggcacaatgtctccccttactcatcttgaaaaccactgctataaaagaactgggacagctaaagaagccatcatctccaggaaatcctgttgcaggttttccctgaataagggagttagtatcctgaggaatcctccaaaagactgttggcctagtctctcttgatacaggagtttaggagaaatcctaatgcattcagctttcactgtataaaatagttcagatatttcatctccacaaaacttacataaaatcacagagaaaattaagatggtatgggtatgaggggttaccctgaaactgaatctgttttccaactattccagctcttacagacttacctgtaagtaatgtgaattcatatatttcaaagcctgatttcagttttacattgcaattgtagttagagtttcaaaatttcttgttcatactaccaattttgctgtatttctctttagtataagcatattaaaagggaaaaaagcatgtactagcctgcactccgaagtcaagactttagtaaaattaggacgttggtcttgattaacttaattggattgctgaaatctctactgctgattggtaaaaacggcagttagttaattcagcactttcatattgttaaaggagtttgccgcaaaattctcactagcttttaacattttcagaattaataacagtaactttcaaactagaaaaatatctaatattcattgagttcacagatttcaaatatgtttatactgtaagaattagagcatttcattaaaaagttggtattctattggttatcaaattagtaaggaaacatagatcattgaaatattacaaaggcatcatttaatcagtaatttttactacatctcttccaaaaactagaaccagaagtcctgacacctgatttcccatcactagcaattttcctgattcacccacccaggagacaagatttgaatgagcagtaaaaatggccaaagatgagatgaccaaaaaaacagtgataggtctcaaacacagccagagatcaatcaggtgctgctttgattctactagtggttcttaaataaaagtattatattttctacgtcagtggagcatacatacattgtcattggtcttctatgctaatatgtgaagtgaattctacctttgaccttagaatgtatatagatatgatcaagtctttttagtcaactgtcatttgataaaaacaattaagatttagttaattgttgaattaaatggacttaagatattagataagtgggtaattcagagagtaatttttacattttatttagaaaaccttaagtactcaagttgaccaggaggcaccaagtggtataaatacagccagatgtaccagatattcctggagagccctacatttaaatattattctctttcattgtaccagcaattatattaatatatgtcaaaccatttgaccagatttctagtacaaaaatacaatcatgctattttgaaatgaaaagggggctggatttggagccagggtccaggttgtagctctgccgcttgtgacttggtcaagtcagatacctctctgagcctcagtttccacacttctaaatgaaaaataaatcccagtgggtgatgctgcctgttgcgtcatccatgtcatgggttattgtgaggataaaacaaggccgtattctaaagcatttttgcagcagtaaaatggctctgtcttctacaggatacattctacttttaggggtaaattgcatggtattagttaattacatattcctaacggattgtgaactttctcatggttggcattcttgtcatgtcaaaataatgttttgccaggtattatcatcacatacaatagcatttctattggagcaaaataaaaagctcattttttaaagttggcgatacctcacatcctaattagtttcagctgaagataatttcagaaacttcccaggcgctagttcccttgtattaggagggttgctgcagaggtgaaatagttgtatattccagtagctatgtttatttagttcacacattatatgcagtttatctttttttcatttaatcttagtgatagttgtgggtgtaggggtggattttgtttttgttttgttttgtttttaatttcagttctggccaggaatgatggatgaactctccgagttgagagaattctatgatccagatacagtggagctgatgaactggattaagtaagaggattttttttaacttttaaaattttaagtgccttttaagagtcactatagaccacatttcgttttgggggttttttgtttgtttctgaatctaattacgaagaaacattcgtccttactagatttttctttaaaactccatatttgaaaataatgtctttctatttaagaaatattctctccagctatatctcatgaagaaaggaaaatacccatttggagaggaaaaccgattcaataaataaatttcaaaccactgacagaaatggcaataaaagtttataatatctgttgaaacttaaaatttgatgtctctgccaattttatgtttattattttcattttaataccattctgattttccactaatggtgacacttgaaagtattctttctggccgggctcaatggctcacgcctgtaatcccagcactttgggaggctgaggtgggctgatcacccgaggtcaggagttcaagactagcctggccaacatgatgaaaccccgtctgtctctactaaaaatacaaaaattagccaggcatggtggcaggtgcctcctagctactcaggaggctgaggcaggaaaatcacttgaactcgggaggtagaggttgcagtgagtcaagatcgcgctactacacttcatcctgggcgacagagcaagactctctctaaaaaaaaaaaaaaagaaagaaaaaagaaaaaatattctttccttgttttttaaattatactgtaaactccagttaagtagaggctcatgacagctcagtgcggatttcatgttaactcatcatattgccaaagcctaggaccagagaaaattttagatacaaaacctggaactttccgtcttgaatatcataatgctttagtgtcctattggctcttatttctgccggcactttgttgttttgcctcagcattcagcatcagaatgaaatttgtgtatttcaaagctttattaacaaaacctgcctcccaccagcaaaaataaacttttctacccagagcaccattcctatgccctggaacactgtatttccctacttttaaccagaaagcagcagtgtaattattcacatgtaaatagaggctgtgcatcacatgtggtgccttctgaaagcattggctggattgtctgcgtcccatggctaatgcttactcaccagtacaggtcagccctgcgtgtctgcagagatggtcagtgcttgacagctgaggcctccctagggcaacgcatggatctcatagagatttgtctaaaacatacacatggctttggtcctaatgtcggactgggtttgactagatgcagtgagtataatttttcacatatttctggtgctgagagcactaagcgttgctttgtctttatttaattttaaatcatgccagacgattacagagtaaataattccttcagtatttattatgtacaaggaaagagagttattcgtgtaaaggaaagctaattacttttgcattaactatagtcagctggaaatttatgacgtacatctgaagttgaggctgatattttctgttttcaggactatgctgttgaaatcaatgctgaggacccctgctttctggtagcatgctgaaggtggtgggtcttccggatctccttagattagcaccataaacaccccagtctttcaggaattaattataaagtcattaaaaatgtattctagcagagccccaggttatcttcggcagtctcagactagatatatttatttgtagtgcctttatttttatgcttttccccacagaaaattaaaataacatttctggctctgaaaaactggatgagagatgattccaggtgtaaagaagagaatacaagtgtcctatttccctcgtttgggaggtgatgttcactcctcagaccctccttttgctaacagctcgtctccctgtagtgcttttgtagtagacatattcctttggcttttttttttttttttttttttgtaattctcagcaactgaaggatttgccttgttccaaaaaatttgttctattgtgatctagtctcagctttttcccctaaaattcttcaaatctaaataatatttttgtaaaactagctgcttggtatgtttgcaaaataagcataagtggtgatgaatgtatgccaaaatagggtctatgtagacatcaaatatgtttgtttaaatcaacactcaaatccacactggcctgtaggtgtggattccaaactcaagtgactgccttaatattcttttaatctgccctgatttcttctgtttttgaaacgtaaaatatgaccttcaagtttcacctcactgctttgattagtcacacggtatccatgttattagcaagtatgagttgtgctggagaaaaggctgcggcctaaggactctttcagacgcatgggctgtgtctgaaagagtcccaagacgcctggcagagaaccagcactgtccctgagggctgcctctgtcctccccagcctgtcttcctgtctgccctgttcccagacagtcaaagcagacacactcaaatgtctgtcttctgcccatgcaatcatcacggcatctatcggacaggggcacagcctccattaggggagggatggctgtccttgggatgaatcacaactagagaaatagtggcctgtggaaaccctggggacacctcaagtgaccctccattttggcacagggcaccccttacgtgacgtgttgaaaagaagcttatccatcctcttcatcactcacacacctggaagtgtcccgccccgtgtccttgctgctggagtaagccacaccccacatgaggcattacgttgtgctcctggacacagggcttccgcttggagattcaggctttccaagtattctcagagggcttctctgctttaagggtaaattgaaagatgtggttgcctcagtgggagttggttcttttcttttttataggctgaagagatatcctcaagggaaaataaagggccttacctgagggtgacacttaacatgagaagggtcatacccaagggattggattcctgtgaagactcttaaagccttaactaatttataaagttatttcacatctgaagttgtgcacttattaatatagttcagcagatgttcatcgagccccagctgtgtatgggcaccgtgtgaagtgtgtggatgcaggtggcgctccactgcagctgcctttcactggagtaaccgctgggcctcgcctcagcacaattgccctcattcttttctcccgaattctcaccctcgactccattttaagatcttcagtggcttagcaagttcagtgggaaagttttttttagaattctaatttttagtaatagaaaatgttttatgctttcctatctttagctcctaaaaggagtagagattgaagcttcagtatgaaaccaacagtgtttagggattaagttgctcttttttacaaggatggtgtgacatttgacatgttgttaaagtcagggccccaggctgcggtagccccagccgccttccctaagagctgggaggcatgtccagccttccacaccccagcctttgtgcattcacctgcctgctgctctccacgctacaccgatgcattgcatgccttgttttcaagcagaattaaatgcatatattcatatttacccttctctgctgataaggtttcctggatacaaagattaaaaacttggatttttttttttttttttgccttctggtgtctctttcagcaaaagtcaggcggtagttttaaaggttttctgtgcaattagaaagcacgtttacctcagcaaggctgaatgcaaccacaatctgtggtttctaccttgttcctttgtgtccttgaatgtttcatttttcgttcctgaaaattttcttctgacattttgcaaataagataggcatatctatatatttgcatattttgagggatgacattttagctacttcactttaggagattttcactggaaatagtctctttccagtaatgaaacccgtgtgtgcagtattttctcaatgggtctgaaaaaatggaccaactttctttcacatttaaccaaagcagaaagttcgtgtatattttaaatatgatgtaggctaagttcagaccttaaatgcctataagcctcttttctatttaatgaatcattttgtagtatttgcataattctataaatttttgaagtgtagataaagcaaatgttcacacattatattataatgctcagtttccccattagttcaacagcaattaacttgttgaagcttagagcttcaaaaataaatgagattatttgttcaaaatgccatcaggtcttcctggaatgacatttaaattatataatgtaaatccatttgacctgtgagtccttgtcattatttagtgacatttcttacagaacaaattgtgtgcaggttgggcagcctgctatggagcttggcagagagctataaaaacaaattatcctttcattttatacatcatttgttcaaacatttgtaaaaattgctttgtttttctataatagagaaatgtcattcagtggttaaaagcacattagctattttagatacagaccacagactgtatcaggcaagagtgtctgtgaaggaagagcacccagcattatgtccatcactgtgcatgttttcagctaaggacaacggatcccttctccctttgcctgctaaatttaccacaaaatagaaaggacagtgaatataagtatctttttaagtttagaaatgtgtgattgtttgtttctcattttgttccactttgcttgtagcttttcctttggcatttgccttacgggtagagtgaagtattggaagtagcagtgatatttcccaggtttaccacggagctggcgtatgagacaaagccacatggcatggagggaagaagcatcatccctactgtcctcagaagtcagtcattttcaaataagtgttatttttggttttattttatttattttttgagatggaatctctgtcgcccaggctgtagtgcagtggcgtgatctcggctcactgcaaccttcacctcgtgggttcaagcgattctcctgcctcagcctcccaggtagtgggactacaggcaggcgccaccacacctggctaatttgtgtatttttggtagagatggagtttcaccatgttggccaggctggtctcgaactcctgacctcaagcaatctacccacctcagcctcccaaagtgttgagattacaggcgtgagccactgcacccagccagaagtattatttttaattcatcttataggcatgaggatatatgtattttactgctttaaaataaagccaagtcctcagtgaaagagtatgttaacaatccagatgattgtggcactaacacattaaatagattacacttcttttaaactttctgactttttgctaataaggccagacattaagacagtcacaacttaatgagcttcattccattttttctttcattcccctgagcagccatgtgtcactcgctctgctggtgatggccctgctgctgccttggggctgcacctgctaggggccggggatgggagccactcaagagctcttagagcctgctgaggagagagcatcttcagtgactgctgtttcatttccagcttagctgaaggcttgcagtaagcattagtaaatacgtgatacactaggctcactacagcactgggttattttgaagtgtttgtctgtaatgggagctgttaagtaagcttttttctttttttttgagttggagttttgctctgttgcccaggctggagtgcagtggcacgatcttggctcactgcaacttatgcctcccgggttcaagtgattctccctcctcagcctcctgagtagctggcattacaggcacccaccaccacgcctggctaagttttgtatttttagtagagacaggtttcaccatattggccaggctggtctcaggctcctgacctcaagtgatctccccacctggccgtccaaagtgctgggattacagacatgagccaccacacctggtctaagtaagcttcttgaagacaggttgtcataccatgtttgccagcccagcacgtaatagaccctcagcaatattttttgaataaagaacgttataactccctagagggcagtttaggactttgggcatttaagcctttgtgaactctgtaattcatccaagggctatgattatagtccaggaggcaggctgaaaccttaatcattagctgtggctggataacaaggcctgtcatctctgctgtaattataaactgcatgctactatagctttgtgcatcttcttggtgctgaagctgcacagagattcctattatacattcaaaacggtgatggtgagatagtcttgtgattggaatggatgttggaagctcagctgccgggttcgtcttttgtgtagaaggccagcttggcactgttcaggcagtgagactacaaaccaggatcattcgcctctgatagctctcgcctccacctcctgctctgccaggcgtggaaaccagactcatcatgttctctctgcatcctaaatctgtctagttcagaggaccaaagacagccactttttggcatgggtgtgtcaagttatcgtatcgttgattgctgtggaatggctcatgccagttgagagtattcaaaggaaagaagcctggcttggaaaaatggtggcactttaaaaaactaatatttgttcatacttgtttcctttagcaattacactctaggtaagggtagcacagtacacaaggcccagagtaagtgtttagtaagtgtcagttgaattaaactgaatttcagtaaaacctttcactaaggaattctgtgcaccttcacgttttcattgaaaccctcttattcctctgaccatgtgggacagaatgtgagagagtccctgtaaattgttgatacggggaacagagctaacatctatttgttcttgttcctgggtctgtcagaatgacaagctctcaagtgcagccaagctcatgtgaaacttttttcctgctggaatctgcattctagactctggcatgggagaggggatgcatattatgtgtcattatgtatgctcattgtcattccagccactttttttcctcacttaagaacgcttattggaatgcaagtgaatgagagtgtcattgttagaaagaaaatcttgaatttttcaaaagtaaactatttgtaaatgtcacaacttgaattgtgggatgtcttgcttgtagacatccaaggcctctgttggatggcattcacgctggagtcttagcgctgagttggaataaataaaacatcctggtgggatgtatgaatgtgatgaggcttctcttagaaaccgcagcaccagagctagttgcgtgccctgctccaaaaccatggagaacagcctgccatggctttttctgcagaggatgttgaattttaatgattttaaataaactcctcataaccatcttcctcattttagttcagtccagcaggcacagactcctctcaatgcaagaaggataaacgcagcccgcagtgtcctcagtgggcctctgtgggaaattctgcactcaggagaatccccagaagagagctcttagggcctcctgagaaattaactccttgaccgcttacaagtgactctcaggtttccaaaaaaaaaaaaaaaaaaaagaggaaaggaattaaatcagctactaagattccttttttccagggaggaaaaaggaaaaatgcttttcctatattctgggagtcttttcttggtccctagtccctgcccctcacacccctggaagacagaaaatcgtagcgtggtgggaactggaaagtgagtttgtgccttagtattagggtgccccgtgttccttaaactgcatatagtttctcataatcaggaccaaaggtatatgtaaaataattgcgttttcacatcagaagtatttgtgtatcccccatattaagtaataagatattggctatttcagaatcttgtttccatgttttgttgttgttgttgttgttaattctgtttttatttatggtggtatctgtgatttttttccttattgcttttttaagcaaaaacccttggaactgactcatgatcacctgcagtttctggcttgatgatttgttacatgttgctctaggtagctcttttgttaagttcaatacgcaaagcagtggcagtcttttaggttatttttgttagactctgcccctctggaacaatagcaggagaggattgtgggtcttggcctagaagcctggactcaagagctacactgcctgccttctaagacaattccttataaaagtaaacctagcaaaacagtaagaagtttccccaccgttattctggtgaacagtcaaaatcatacaaaacattgttgtaaaaaacatggggctggtgcaaaagtaactgaggtttttgccattgaaagtaatggcaaaaaccgcaattacttttgcactcaatagtttgagtacaaatcaaaaccgaagcaaactcccgttttttttccctgactcgtaacacttggtaacatagctggattcttctgaaaaagtttgatattgtcttctttgttgtctttaaggatctcttaacagtggggttaattcagactctaaaatctttcagctctaacactccaagaaaggctgtgtttgcgggaagcatgcagttgctggccggagtcaagctgtgcacgggaaggaccctaaccaaccacccgcactatgaagacagcagcctgagagagcggaccagagcggtgaggctccccagtgcctcccctcgcttcttgtgggccagctatgggctgcgtgtccctatgtgtggtaaagatggggctgaatgctgcaccctccagcattaggttaggaggatgaattagtctgttttcacgctactgataaaggcatacctgacactgggcaatttacagaagaaagagaggtttaattgacttacagttccacatggctggggaggcctcacaatcatggcagaaggcaaggaagagcaagtcatgtcatacatgggtggcagcaagcaaaaagagagcttgtgcagggaaactcccccttataaaaccatcagatctcatgagatgtattcactaccacgagaacagcacgggaaagacttgcccccatgattcagttacctcccaccaggtccctaccacatcatgtgggacttcaagatgtgatttgggtggggacacagccaaaccatatcagaggggaaatcagaacgtaagtgcacagggctcgcatctcctggtccaggacctctgcctgcccatatccactaaggacgtgccattagaccacaggtcctccccaggtcgggacctctgcctgcccatatccactaaggacgtgaggttaggccacaggtcctccccagggaagaaccgagaagacacacgccttgagatgtgcagaagagcgcatttgggagcaaagcttttggattagggaggggaaggaaaaggcgttgaggcatactggtcacgtttcttatggacctttctgaagtctggggtttttgttttttaatagataataatacagtctcatagttcaaaattcagaacatacaaaaggaaatatggtgaaaagtgcctctcccattattgcagttcttagttcccctcctaggaggcagataatgttagcagtttcttgtgtctccttccacaggtatttcacgcatatacaaatatgcggggagggtggtgcccctttctccatttttacagaagaagtggcattctacattctgcttcttcggcatttaatgtgttttggaaaacattctatattcagtatattaacagcttccttcctatttttaaagctgcttaatattttacatggatgtggcatattttatttagccatttctgctgtttccctgtcttttgtgattatatgaacaatgctgcagataaacttgtctgcacatcactctttccaggcacggtgtctgtctgtacagcagattcttggatggggaagtgctgggtcagggttgttgacatctgtagtgtagatcgagagatgttatcaagtcctctctctacaggttgtatctgtttacattcaagtcagcagtgcaggaaggtgcctgtgttccttcatcctcaccagtcaggtttcaaactcataaatgtttcctaatgtcacttttttcatgttggcggttgaaaagttgttgaaaaagtcttgttttgaggtgagatttgactagcctaaaagcagatgatttttactaatctcctgtcttgtataagaatcatttgaattcagactcctgctaaaataggaattttttgatgggctgaagtgttccagatagttccaaattaactaggaggatgcaggaaaggggctccctggctttccaggcaccaggttcatcaggggtggcctctactgcttggactggagactgcagaaaagacaggtcgagtgcacagaacgtcctgggcatctcctttcctgtctcagtactagggttaggccccacacactgacatcctcaaggccctacggctcttcatcaggaccctggaacccttggaatgccttcagcctgagaccttgtgctggactgtaggacaacacagttgtcacagtaacagcatcctacctccctaccatttcacccatccatgtggacacatcaagttagaccctcaagcccaaatcagaaatctagcactcgaaatcagggtgcaacaaaggaggcagtgcctctcttcatgaacccccacattcaacacctcacacagcctgtttccattccagccccagaatctgggacgctcagtttgcatccatccactgagggtgtgtggcactggtatgaacgtgaagggggcctcctgtggcgttgcccacggtgtgctgcaagtggctctcacccctaggatggacgagagggagaggagcagtggggtctctcaattagctgagatgcggagtagcaggtaaagcagccaatgctgccccagcctaggagcagagaccctacagggatccttctccccacctaccagtttcagaagctggggctctgccttattgggacgtgtgtccctcagactgtcccatcacccttaatgggccattttagtctgggggtcccctttttaaaggtagagactgtgtcttatttactcagccctgtcatttaccttgggaaagcagtcttagaattggtgcctactgatgaatatagtcctgacttgaagtaatacattctgaatccagatgtgttcttcctggctcactctcttcccaaggccgagcactcacagcgttctgggaacttccacgcacacactccaggcctgcaaatgagcgagtgcagcgtggcctgggctggagagagcaccttgggtgttaggtcttagactcagccctgtggaaggttacatcacatagttaactccctggcagtcaagtagcatttgccacattgcatttttatgtctttttgaaggtttatcagatatatgccaagagggcaccagaggaagtgcatgccctcctaaggtccttcggcactgactacgtaatcctggaagacagcatctgctacgagcggaggcaccgccggggctgccgactccgggacctgctggacattgccaacggccacgtgagcatgctgcctctccctgtgtgggggtctcctggaggggcgggactctgatttgaatcctaagaatgtgaatctttttatccttaatgtctagttgaattacgctacgaatcaagtatttgctttttctcttgcttcctacagaagccctctcttggcactttagtgactgccaccggggctgggcaagggagaggtgagaggggagccctgggtccccagtgtcacaccaaacagagcagctctgccttcagctcatttgtatgatggggctctgcataaaatgtatctgtgaaggattttgctgctataaacaaaacctcagcctttaaacccactgctccaacgcttcgtattggctagctgctgcatggcagggatggtggggccctcctgccctccggtctaggtggtggattccccctacccctcctgccctctcctactgagtgtcctgtgtccactggtgtgtttccacaggccggctttcagaggctaagttgcactccagagcagaaaagcagcaagccgcttctcccttctcccttctgaggaaagtgttcttggagctatgccaggtctcagtagagcaaacagattttcaccctttagaggtgtgatgtgtgctgtaattaatggtatgaaagccaatagatatttgtaaacaagttggacaaagtgacaaacctagcctaaatttgaaaaaaaaaaatcttgactgtacagaatttgagattcagatttttgcccgaggagaatcatagttcataactgtcttgagttcagaggtggtacagaccagagacatccatttaaattttgatttgagcgtgactttttcagttatttatttatttatttatttatttttagagacagggtctcactctgtcactcagactggaatgcagtggcgtgatcttggcttactgcagcctcaaccttccaggctcaagtgatcctcccacttcagcctcccaagtagctgggaccacaggcatacatcaccatacccagctaattttgtttattttttgtaaagatggagtctggctatgttgcccagatgagtctcagactcctgatccaagcgatcctcctgcctcagcctcccaaagtgctgggatttcaggcatgagccaccacgcctggcctaaatgtgactttttctgatgagttagagagctttctctgatcactgtagttctctgtatttcatttctatgagagagacagtatagtatgttcctgagagcaagcagacctgagttctagttctggctttcccgttaatgggatcatcgtgtgacgctgcactctccttctcagccttggtctgcacttctgaagggggaaaaggatggccctgatgatctccaggtgcccatggacattgaaataatataatttaatttcactcacataccattcttaaacccaatacccattcctgctcctactgtcttttgtaaatagaattttccccccaaattgtatttgggtttgttttggttttagatgatggatggcccaggagagaatgatcctgatttgaaacctgcagaccaccctcgcttctgtgaagagatcaaaagaaacctgcctccctacgtggcctacttcaccagagtgttccagaacaaaaccttccacgtttacaagctgtccagaaacaagtagcgcagatttctgcccagtgtctatttttgatacggagaaactgcatcatgatgaaactcaatagatgacgtttcctatgtaagtaggtagcccaaaccttcaagctgtgatatgagtaagttctacagatgtttacacaagtgttgccatctttgaaagcatcttctacaagcagaagtctttttcgttgtgtgtctatctttctcattaatgttctttagcctaaatgttaacaactttctaagagtgacctagaattatgttgttggagagaatgatgtgtgttccatggatacctggataggcacataacatgttggaagatgagcacctgctcaggatttgaaatacgtttaattttcaggtgacttaagacagctatgattgaatcaactagagatgatgatcgacttatttaatatgatttcactggtgaagaccaattggtagctttttaaaaagcactttagtgtcctgttttaccttaaaatgttataatattttccagttgtcatgctgtcaacattaacaaaaaaaatcatgttaaggctttgtatcaaacattttgttacactctgtctgaaatgtaatgtggagtacttcagcagtatgtgtcatgtattgtgtgtgtctgtgtgtgtgcatgtgcacacatgtgttttaatgctgggcacagaaaagtgttacaagttccatatcgtaagtccttaaaggggcagaaatatatgtagccaagtagaatttattacattttagtgttattattttaaaacttactgatactctttaacctctcctgcagtaatagttttgctttatttcttactcatttcaatttattgggtttgcaaaattttgtaaactttttgtgtttttagcctttgtattttttacagcctagaatcttgcaaagtctgaatattttttaaatgttctatcttaactagttcactaatacagtatttttagcagacagcattttcagacagcattttcataccaagtttgacttgtggtctccaatcttactgggaaggccctggtagtgtaattcttttccttattaaaaggtaaccaagtgcctctaagtcatgcttatttgtaaacaacaaagaagagtatatgtacctgctcaaaatttttttgataatcgcttatataattaatttctaatgatgaggacatgtaaaagttgccagtaagaacatagtatgcatttaattaaatcaagatggctaatggaattaactttctcccctgttcttgccaggtggaaatgatttaagcatttctccttgcagttgtattgaagtaaattaccataggcatcaagatggctgcatcacattttcaaatgattttatattcagttgctacttataaagcagcattcaaaaagtcttttacactgtcatgttggacacaagcagactcagcttttatcaaaacttgtttaaataaaaaattgacagtagctgggttattaaattatgcaactgaaactcctgaattatatcttttctgtatcccttaataagattggagaccactgccgtttaggataatacaataataaaacgttttaatcagtactaaaactttaattaagccaataatgatgcatgcctgttgtagctgacagcatgggtcagtacatccttcagcgagtgccttactctaattgaaaccaagcacacgtaaggtacaatatgttagactctgtgattttgttttcaaaatcctctgttatggctatatttaaatttattttaaatattcctgtatgtattcatctaagcatttgggcatttggagtcttaatatacaagaaacacgtacttaaatttttatgcttatcaccgcaatgatggcaaacagtgattttttttttcatagtttaggtgtcattgttgccagcacctttagtgctcagtcttcagtgaaaaatataaagtgccaaaaaaatcttgcaagacagaatccatacttaacactctttccaagacactgtgaccatgtacagtagctatttcctgatgaccaaatctctcaacgaatcatgttattaataaatatttttagcactcatcagtattctccaatgtgaccttctcattggagtacacagaaggaaagcaaagaagagcatctgacttctagctctggcttacagcctctctaccaggccgaagcaagagacccgcggcagcagctccccgccactcagacctgggtggtgataacctcaaagaatggctctgttttctattgacagaaaacccacttgattttgcttctgagttagcagtcagaagaccctctaagtacaatagaagtgctcttaacggactctgcctgtgtgactcccaggccccggagtctccatctctctcgtaagccacctgccacagcacagctggaggctgttctctggtgttctcagcgctccggctccctccctggagttgtgcacccgtcccaaactcctccatgcaagttctgcttcctcttataagtacacaactcagttaagtattcacatacacacagaaaatacgggtgtgaaaagaaagaattttctgtaaaaattaagttgaatactttggtaaaaagtgataaaggctgagttgccaataaaagttgcttttaaattaggtgtggctgggaatattataagatattggggaaaatatacaaatcaagaaaatttctgagcttagattgcttcatagatttatttaagtactcatcccacctttaaaacctctaaactgagaagaagggacccaaatcatgttattggtgtgatttatgtgagaagtagaactgtagtcattggacccttaggcaaaggaaaatccgtgtctttatatcagaagatcggcaaacgaatgtatattacacagtttaggttatgattccctactttaacctacttactttattaaatgaccaactactgatactgatcacaatagttattagagattctaatttagttggaaggttctaatcactttcattacaggcatttgaaaaatagggattcatttcgaatatattagccaggagcatagttagatgttacccaggccatttatcatcctgttaatgatgattttcccgacccttgtgagatcagcgtgacaggagtgtgtgtgtgtgtgtgtgtttctgtgggtgtgtggttttggttgggtgctgccaggtggcaaaggcatatgtaaatacatctgatctgcatctttatttcacagttaactaaaagtaaaaatgtctattctgattccatattgattttgtctaagatgtaaaaatttgagttcatctttggccaaaacctacctgaattaacatacaaaatatttgatttttaaaatttaattcaaatctcaaaatcaattaagtattctcagatcctatatcttggttaatatgctcccagatactttaaacatggcaaccttttggcctaagagaatgtttgttcatggaaaaaagcttttgagatgagagggtgtcttactttcttgtggcaattgattttctgttttaacaccctttgggtaaaatcttgcaaagagcttttataatttgttttactgaattgtatggagattgtataccaagtaaagctcttttaaattacataagatgagtgtcttgcatttctttgaaggtcaaagcccaaggaacctgcttgttgaagtgcattaaatatttgctaaatagagtaaatcactaaaggttagtgtgtctactaaaaatacaaaaaattagccgggcatggtggcgagcgcttgtagtcccagctactcaggaggctaaggcagaagaatggtgtgaacccgggaagtggagcttgcagtgagccgagatcccaccactgcactccagcctggccgacagagcgagactctgtcttttaaaaaaaaaaagagtttttcacctagattaagtcagacccacccaatataatctccatttttgttagctcaattgtaattgttagcttaattgtgattgttattgttgagggtgtttattttttagaatggaatttggtttgacagctgcttatttgtttcacttgaattccaaggttatagtttagatttataaggagaagactactatcagcagaatttatccttgaagagataaatgctagtttgacctcaagaacagtttctacttgattaaattctgagtctttagtaattcaggaagatgggtggtagtgcacctgcttggttggagtgtatagataacaaatgtttggactgttatgttcaaagcagaagttgaaatttcaagcaaaaatggtcagacaaaatggaaaaaaactggcagtgaggtctcaaatattctgtactgacaggtggtccctagcaaaataagaataataatatagataagcaggagatgtgggatatgaatgaactgacatggaatgggctgacatggacaccaggcacttgacagatgaaatgttttttttctctgcccctcctttcagataaggtgtctgaaactcatttcataaaccttttcgttattatttagaagtttgctttataagattgtttttcaaaatgcagataatagaactatagtataatgtgaagtcaatttcatgggttacaaccaacatttaaaaggaaaggagggagggagggaaggaggaggacagcctaatgttaaatataagtgctgttttgtggattatctattccagttataggtattcatttttggggggtacaatataaaatatatttcttccgtgagttatagtcaggctgaaagccaggcctttattagctgagggattctgggaggatggcagcttgaacttacctgtgtccttgccctctgtgctagcagaactgtctgaatgaacactggtgatattaaagaactagcataatgatagagaatggctgggctcccggctaaaccccacccttaagcctggaaccctggccctaagtgaaaacagctgaccctgtttttctgcccaaatgttgccttttggggctgccatgcccctatcctgtgcccataaaaagacttcaggtggcagagcaacacaagcagctgaacagcagggatacaagctgccaactggcgggaatacaagcaactgagcagcagagactacagatagacccagctaacttcagatgtggcttcagggaaagatcaccttcccacaccatcccctttccaactcccatcctactgagagccacttatatcacccaataaaatcctccacatatactacccttcagtccattcatgtgacctgattgttcctggatgccagacaaggacccaggtgccaggagggcaggggcttggatgctgctgtggggcccagcagagcctgcctcctgccaaagaggagcaactgtcctgttccagccttccttctctccggttcctgcactcacttgctcgcatactccctctcatgaggagcagccagcagcaggctgagtgaaacagccactccagttttcacccatgaaggggttcccttgaagggaacagtcccatctcaataattcttatatgtgatatggacattttcttaagtttcttaagtttctttaaggttcttaagtttctttttaaagtccttatattttaaaatatatactgaaatatttacagacaagtatatgtctaggatttgtgtcaaaattttgtggggcatctagatgaaacaaattaacaatgaaaagatatggcttaagctagtttggaatttttatatagtgaaaagagagaaattagacccaacgaaacagactgaaactaggaacaaaactaggaagataaaatttaggagatagctgaaatcaatcaatgcaacaaatagtagaaaggataaataaattcaaaattcagttattttaaaataaagcagttaaacactgggccaacctgattaagacaaaatagcaaaaatatacaacagtagaaatgtaaaatatataattccagaatcagggataataataattatatgaggataacatatgcaattctgtaacaaaaataacctataggaaatgggtgactttctaacaaaatagaaaatgtcaatgtggcctgaaaaagaagttgaaaacttgaatagacaaaacccatgaaagttctggcatggggttcaaaggttgcaaaggacatttggacaagaagggtgcacagccagattctttctcactcttaaaggggatgactcccaagttcacctagtctcagccatagaatagggagaaccccaagttttaggaaagctagtccaactttaacaacaaaataacacagagagtgtatcagttttctattactacataacaaatcaccacaaactttgcagcttgaaacaacacacatctattatctcaaggttttgtggatcaggagctgaagcacaggttagctgggtcctctcctgtctcacaaggctgcaatcaaggtatcagccgggctgctttctcatctggagttacaggacctcttccaagttcacgcaagcttgtggcaaaattaaattccttatgcctgtgagactgaagccattagctcctagaggccacccctctctaggcgattcacagcatggccgttagcctcttcaaggccatcagaaagcatttctccagttactgttttaagagtttttcggccgggcgtgatggctcacgcctgtaatccagcactttgggaggccgaggcggatggatcacaaggtcaggagattgagaccatcctggctaacatggcgaaaccccatctctactaaaaatacaaaaaattagccaggcatggtggtgggtgcctgtagtcccagctactcaggaagctgaggcaggacaatggcatgaacccgggaggtggagcttgtagtgagctgagatcgcaccactgcactccaacctgggcaacagagcgagactccgtctcaaaaaaaaaaaaaacaaaaagtttttcacctggattaagtcagacccacccaatataatctccatttttgttagctcaaaatcagcttgtttgtgacctgaattacatctgcagaatcctttcgcttttgctatatagcctcgcctaattacctaaataggagtggcatttatattcataggctcatccacacttaaggggaagggctctgcagggcatgttgttcaggcagtgggaatcttgggggccatcttagaattcttcctaccacagacagtttaaaagaacagggtctgggccaggcatggtatctcacgcctgtaatcccagtgctttgggaggccaaggcagaatgatcacttgaggtcaggagttcaagattagcctgggcaacataacaagaccccatctctacaaaatatatttttttcaaattagccatgagtgatggcacacacctgtagtcccagttactcaggaggctgaggtgggaggatcccttgagcctaggcgtttgaggcagcagtgagctatgattgcatcactgcactccagcctgggcaacagagcaagaccttgtctcttaaaaaaaatgtaaaaataaaagaatagggcctggcgataactgagtggcaatggttaacatagggcttttgtaaactttgacagaaaggagaaacacaaggtgaatcccagggttacccaggctttctcccttagaggattttccaaactgtggcacaggaaaatggagcccaagcagagtatgtcaggctttctggaggaagcagattggagttgatagctgctgaggtggctggggtttggcaggggttggaggggcagagcaccagagaggagggagttggaataaagaaaacctaagaatttcccattgggtccttggtcagttcctagcctgcagaggcttagcagagaacatctggtcagtggcagagctgaacagaaatttcagaggttacacaatcccgaggagacactggaatttgggtccagctggggctgagagaccacggtcaatctcccaggcattcagctgagactctggagagactataccttatcctgggagtagaggctgttatcccaattgcctgccagaaacaaatgtaaatctgctatgaaggatgatagccttattcatggcttcaaattgtctttacactttttatatacacaatgtagcactcaataaaataatcaggaataattttttaaaactgagaccaagtgtggtggctcacacctgtcatcccagcactttgggaggtcgagaagggaggatcacttgagcccaggaatttgacagcagcctggacaacaaggcgaaactctgtgtctacaaaaaatacaaaaactggccgggcgcggtggctcacgcctgtaatcccagcactttgggaggccaaggcgggcggatcacgaggtcaggagatcgagaccatcccggctaaaacagtgaaaccccgtctctactaaaaatacaaaaaattagccgggcgtagtggcgggcgcctgtagtcccagctacttgggaggctgaggcaggagaatggcgtgaacccgggaggcggagcttgcagtgagccgagatcccgccactgcactccagcctgggcgacagagcgagactccgtctcaaaaaaaaaaaaaatacaaaaacttacgtgtggtggcatgcgcctgtaatcccagctactcaggaggctgaggtgtgagaatcacctgagcctgggatatcaaggctgcagtgagccatgatcatgtcactatactccagcctggtgacaagagtgagagcctgtctcaaaaaaacaaaaacaaaaaacatgactgaaacagaattgaagtagaaacagtgccacaggcaaatcaaatattgcagcctgaagcatagactttaaaataactatgtttatcatatttaagactttaaatgacaagaaggagaatttaggtgaataactgaaaactttataaaagcaaaatggaaatgctagaactgaaaaatgcaatgaattaagtgttcactgttgggttagacacagctgaagagagttgatcaactggacaataggttagaagaaaatatccagactaaaatattgtgggctggggagaagttgaaaaacaaaggaaaggctgtgtgtggtgactcacacctataatcccagcactttgagaggccaaggcaggatcggttgggcctcaggagtttgagaccagcctgggcaacatagtgagacccgttttttttgttttgttttgtgtcgtgttatgttgttttgagatggagtctcgctctgttgccaggctggagtgcagtggcaagatcttggctcactgcaacctccgcctcctgggttcaagtgattctcctgcctcagcctcccgagtagctgagactacagctgcccaccatgcccagctaatttttgcatttttagtagagacagggtttcaccatattggccaggatggtctcgatctcttgacttcatgatctgcccgccttggcctcccaaagtgctgggattacaggcgtgagccaccgcacccagccctgtttttatttaaaaagaaaaaggagagcatggagtatattttggtatattttatgccattctataagtggtactggagtcccacaaggagaggaaatagaatgggcctgtatgactttgggcatgctactcatattcttagcttcatgtcttcttttgtaaatggaggtgtaatcataatatacctattggtttgtggggtggattaaatgagataacatttcaagcactaggcccaatatctagcacatggtaagtacattagatgaaagctgcaggattattatcacagtcgtcttcaaaattagaatgtgaaagagaaaagcatgaagagcaaagttacaggtgagtctgacagatactaaagagcccttagtaattttatgttaactattcttgctgtagaaaatatctttaaaagcaaaaagaaaaaaaaaaagaaaacttcaaggactgaggaggagattaagagaacagttttatagataaattagtttcttagtaattcctgaggtgtgtatttgcaacacaaggaaatggatttgtgtttgtgtctctgtgcgggtgaggaagagagacagaaaaatagagccatggacaaagaccaagagagactgattgattggatgttcttagaggagacattatcattgttgaagataaatgccaaagccctgccaaggtgcacatattcataaagaagtagaaggggctgattgtgcgtgaatctgcttaagaaagggaaaggagtgaaggaacatgatttcaggactagcccggtaattagaactgcagtgagctaattaaggctcataaatttaatgaaactattagcattttctcttgcaagaaaaggtatatgttttctctcaggaaatgacacctgtgaacaattatctctcatttctattaagattatttacataagttttgctcatttggcactcactgctgttaattattattttttattttttacaacacctgatatcacactagattcactctgtaggaaggtgctttgggggttactgataattaatagtttagcacaaatagacaagaccattgttaggggacctgctgtactgttactgtgctgtctttgtgggcagcctttttgtttaatagaaaatgtttcagaatctttgaatatctgtaagagcctggtagattatgaaaattatgaacacaacctttcctaggccatcatgtaactcaatggtttcttcagtgagaacttcctgagtacctactgtatgccagaggaagaggtgagaaaagggcgtgaggataggtttatgatataaacatgaattcaaaatatcctattattgcactgaattgaaatggatatgatgacctctaagggaaagccaagggtgtatcatttaggaaatttcaaattgcaagtgtaaaccaaaagtatctgagataagtcttcatttagaaagtttattttgccaatgttaaggacacaccatgacacacagcctcagaaggtcctgatgacatgtacccaaggtggtcggggtgcagcttagctttatacactttatggagacacgagacatcagtcagtacatgtaagatgtacactggttgagtccagaaaggtgggacaactcaaagtggggggctcccaggtcataggtagatttagagatttttctgattgacagaaagagttactgtcaatagaaaggagtgtctgagttacagtaagggactgtggagtccaaggttttatcatgcagatgaagcctctaggtagcaggcttcagagaaagtagattgtaaatgtttcttatcagacttaaagagtctgttctatccataattcccaaagtacggagggtgtaatgaagcatgtctagttcccccttcccatcatggcctgaactagcttttcaggttaacttcagaatgcctttggccgaaagaggggtccattcaggtggttggggggccttagaattttatgtttgatttacacaagtttcggaaaacctaacccaagttgtcttacataaagggaatgttttagcacatttaacttttttaggcctttaggtaaggcttaatctgatatcctagtaattagatttattcaattaatatttgttgagacctaaaaggccttgggaatacattagtgtctaagacattccgtattctcattgagcttacattttagtagaggatacagacaacagataaaaaaataacagaaaacatccaaatgttttaagagaaatgaaagtgctatgatagagtatgagtgggtggctccttgggtttgggtgctcagaaagccttcttggaggagatgtttaggctaaaatttcaatgactacacccagaagaatcacgctatactaagattggagggaagaaggctccaggccgctgagccagtatcacaaagtcctgggcagaaaggagcttggtgcgcctgtcagatgcagcacacaggagaggagagagtaggagaaggatgcagaaggcagaccacacatgccaccatgaagaagttgaatttgttcccagatgtgattcaaaaatggaggattttgagcagggtagtgacattatctcatttgtgtttcaaacagcatgtctgtgaatactgtatttttctattgctgccatatcaagtgaccaaaaacatgcagcttaaaacatcacaaacgtggtctccagttttgtaatcagaagtccaggtagagcaggaagtgactgtgtcctctgcacagaatccaggaagatgaaacctaggcttccttctggaagctccagggatgagtctgtttccaggctcattcagttgaagaaccagggttctcatttcttggctggctctcagctagggaccacccttagctcctcaagaggttcttgctccatagccctctacatctcaagaccaccagcagggtgtcaagcttcacactgccacattccttctgtctcttctctgccgcatcttcttgacttcagctgggaaagagtctccacttttaaggactggtgtgtgttagattggaaccaccagataatagaagataatctccctcatctcaaggttcataattgtcatcacatttgcaaaggccctttggccaaggagcatgacatattcacaggtcctagagattaggaagtggacatttcctagaaattaggaagtggacatttcagagcagggtggcattaatcagccaaccacagatgctgggtggaaatcagatgtgtgggtgaggtatgcgatcagaagcagggagaccagagatcaggaaatttcggtagtccaagtgcaacgttatggtgtttgggaacagaatagtaggtaggggtagagaaaggaggtagggctgacaggacttgctggtattgtaacaacgtaagtggaaccggagatcattatgttaagtgaactaagccaggcacagaaagacagacatcacatgttctcacttacttgtgagagctaaaaattaaaataagtgaactcatggagatagtagaaggatggttacccaaggctgggaagagtagttggggagtggaggggaagtggatggttaatgagtaccaaaatcatgagtaacacctagtgtttgctagcacaacagtgcaactgtagtcaaaaataattgaattgtacattttaattgtgcatttaattgtacatactaaaagtataattggaatgtttgtaagacaaaggtgtattattctgttctcacgctgctaataaagacatacctgagactgggaaatttataaagaaaaaggttcagtggactcatagttccacgtggctggggaggcttcacaatcacagcggaacattaaagaagagcaaaggcatgttttccatggcggcagagaagagagctcgtgcaggggaattcccatttatgaaaccatcagatctcgtgagacttactaccacaagaacggtatgggagaaaccacccccaggattcaattatctccacctggccccacccttgacacatggggattattacagttcaaggtgagatttgggtggggacacagctataccatatcaaaaggataaattcttgaggtgccagataacgccatttactctgatataattatgcattgcatggcggaatcaaaagatctcatgtaacccatgaatatatatacctactacatacccacaaaaattaaaaataaatttaaaaaaaagacttgctggcagattagacattaggaataagagaaagactatgaggaacaacaaatttttttcttggcttgcataacttggtgtataatggtgccttttcttgatttctcttttttttaatgaacctaacattatgaacataaaaggatgccttttcttgagatggagaagagtatgtggtattggtgttcaacaaatactctggttctcccctcttctcggccccttttcgcctacgtggggccttatgacttgttcttgacaatgagatatgtcatttctgggtcacaacattcaacttcccttgcaaaatcctccagaactctctccccagtggtggctgctgctgtgtccatctgggtcctggaataaggatggtgaggagcagagatttctcgccaacttgcattcaagttgtactgtaagaaataaacctgtgttgttttaagtcactgagatttgggggttgtttgttattgccccacagcttcacctattctgacctgacatactgggggaggagcaggaaaaaagaattgtgaattggccatgtgaagtttaaggtgctttttcagtggtgttccaggtctcaggcctctctgcccactgcactgctgtgccgtgaggagtgtaaacatattccaccccattcttgcagacccgctcctggttctagaatagccgcccactgctctcaaggtctgtatgtttcctggtccaagttcagagcggggaaagtgtacctccaagatagctcaaagggccagtactggagcctttttgacctggcttggttcatgtgcccatcgtagagccaaccactgtgaccaggggcatgggttcagtagatgacttggaccagtcagtttctatctctggagttggaatgtggaaacaatcacacgtaaatcacctggctaggaaagccagagtactactgggaagggagatgctgggaatacatgtccagtacaaggaaaaagacatcttcaggttcctgcggcaaatctggcactgcccttggcactttgtgtggtcttacctgtagggtccagccctacggggcttagcgggtgttctccccgtgtgcggagacgagagattgtagaaaagtaaagacacaagacaaagagttaaagagaaaacagctgggtccaggggaccactaccaccaagacgcggagaccggtagtggccctgaatggctgggcgcgctgatatttattgcatagaagacaagggggcagtgtaaggagggtgagtcgtccaagtgattgataaggtcaagcaactcacctgatcatgggacggggcccttcccttttaggtagccaaagcagagagggaaggcagcgtacgtcagcgttttcttctatttacttgtaagaaagatcaaagtctgtaagactttcactgtttcttctactcctgtctactaagaacttcaaagaggaaccaggagtatgggaggaacatgaaagtggacaagcagcgtgaccactgaagcacagcaccacagagaggagtttatgcagccggatgactgtgggagggcctggataatatctagcctcccacaagaagcttgtggagcagagtgttccctgactctaaggaaaggagactccctttcacgttctgcaaagtaacaggtgccttcccaggcactggcgttaccgcttgaccaaggagccctcaagcggcccttatgcgggcatgacagagggctcacctcttgccttccaggtcacttctcacaatgtcccttcagcacctgacgctatacccaccggttattccttggttatattagtaatacaacaaagagtaatattaaaagctaatgattaataatgtctatactactgattgataatgtccatgatcatctctatagctaatttgtattataactattcttattctaactattttatttattatactgaaacagtttgtgccttcagtctcttgcctcagcacctaggtaatccttcacccacacttaccagtattcccatccttcagggaaccattgcaaacactgataatgtggctagaattgacaagaatgtctcccatgtaacctttaaccaccgtcagatttattttgacaaacatttttcccatacaagcaatgaaaataataagtaacttttttttttttttgccagtgcctcaactacagtaattagccatgtagagaggtgcctaaagaccctacagtcagctcatttgtgtcaggtatgttacctttgaaaccatgccccaaagagttaactaaaaccaatgactgactgaaattcttgagcttgcaagatggcagataagaagaaaaacaatttgctgaaacgctgaaactccctccacttgtaagataacaaaactggcagaaatcagttggaccaatattgccaattgcaatctgcactgaaggagcttgtggacatcacagcctacgtttccactgtacatttcttactaactcaccgcagacttgtacatgagacccgtgagggggcatggagagataactgcagttaaagtcctgtgcaaggactttccagacctcccccttcgttccaccaatctcctgctaatcccagaacccagccactaaaccttttctaataaaagtacggcctaaaagccagcacagagtcagatttgagctgaacacctgtctccctgttggtcgacccataacagaaagcttttctttagtcagaaataatggtgtcatcatattggcttctagcgcatagagcagccagcccttctgctcagtaacaccttccttgcccacatcctcttattagagagctagctgagaccacattcatgacccctgcccacagccagctgcccatgtttgtcttacccagggtgaaccatcattcttctctgtgtatttggaaatgtgattcagagattctaattggtctccagtggcaacttgaatcgtgaagacatgaggctagagcagctatgtgcacactaagaagacagccagcctgcagcctgccatgaagcaaacacgaacagtagccatgagaggccaggtgcccccaaggaggcaggcagaggaaacctggggtgtggactcccagggcccacgtgtaagtccctcccaaggctcaccctcattcattgttcctgggtttcatgaagctcctggttacctttcagacgaatgacttctctgacctgggctaaggcaagaacaccttccttataactaagtcgtccccaatgaagaccctaaagaattctcatgagtctgcttttcttgaggcagacaccttttttgtaatgctctttcataacaccaattccaaacagttaaaatggtacttctcaccctgaattctggttaattacatatgcttctgcccttctcacagtgctttgaaattcttgaaggcagaaacttttttttccccacctttaaatccccagtggattcttggagtgagtgtgtatcaagggtttgtggccctggattctgcaggtgaggtcagggtcagatgacagtgatactcagtgaactataattagtgtcttccttccaaggagagaaacagaatgagagcgtggactgtgatgcctggcgagataacttccctgcctactacttttcaaagaaactgacctacctatacatccccaaaagaatatatgaatatgaaaactccactaaaaatatccaggcattcaagtcaacagccaaaaaaaaggcagggggaatagtgacagaatacaaagatagaacgtgtccacttaaaaacaatgtctaccatgtcagtgtcaggtgcagtgctctgatatttattggtagaccaaatataattttgctgttcagatcttcaatatgtatagaattatttctgtgtttctttcttctgttagaggttgagaggcgtttgactctcccactgtgattgtggatttgtctctttctcagtttattttattttatttcaagacggaattccactctgtcacccaggctggagtgcagtagtgtgaacttggctcactgcaacctctgcctcctgggttcaagcgattcacttgcctcagcctcccgagtagctgggattacaggcacacaccaccatgccaggctaatctttttgtatttttagtagagatggggttttgccatgttgaccaggctgatctcgaactcctgacctcaggtggtctgcccaccttggtctcccaaagttctgggactacaggcatgagccattacgcccaccctcagtttagtcctgttaatttgctttatatattttgaaactgtgcagttgggtacatcagtatttagaattgctaacatttgcagggggactgttctctttaaacatctatgaaatgcccacttaatttctaagcagtgcttctgagctaattttgttcaataccaatgtagtctaccagttggtatatatatatatttgtgaccttcttctttgaacctttctgtattcctgtatttatgatatgcttttatatagttagggggttttttttgcctccatttttactcttttttttttttttggagacagtcttactctgttgcccaggctggagtgcagtggcgcgatcttggctcactacaacctctgcctcccaggttcaagtgattctcctgcctcagccttccaagtagctgagattacaggcatgcatcaccatgcctggcaaatttttgtatttttagcagagacagagtttcactatgttggccaggctggtctcaaacttctgacctcaggcgatccacccacatcggcctcccaaagtgctgggattacagacgtgagccactgtgcctggcccattttttctttttaataaaagtctttaggccaggcacagtggctcatgcctataatcccagcactttgggaggccgaggccaaaggatcacttgaggccaggagtttgagaccccccaccaagcaatgtagtgagactcatctctacaaaaaaataaaaattaaaaattagccgggcatggtggcacatgcccatggtcccagctactagggaggctggggtgggaggatcacttgaacccaggagttcgagactacaatgagctatgatcccaccactgcactctatcctgagtgacagatggagaccctgtctctaacaacacaaaaaagtttttagtctgtttagaatttaatttaatcactgacagatacattggagtctacatacactgtctcactgttagttttctatttgacctgttttatattcagttcacccctctgtaagcttacatactctttaatatttttttctgattttatgttgaaatggtgtcgaatttatagaaaagttataagaattataaaaagaacccagattcactgatttttaacatatgaccatattggctttatcattctctcagcagattgatagttacaggaaaacatttattattatttcttctgaattatttaggtatatgctgcatatatcataccactatgcccttaatttttcagtgattatttcctaagaataagggtattcctttatataaccacaattattttaccaaatttaggaactttaacatcaacatgtaataatctatagatctaatgatgtaatctaatgatatatatctaatttataatatatattctaatgtagttaattgcccacaaaatgtttattatagcaattatttttccagtagagaatccattttggaattgcatttagttgtcaaatctttttttttttttttttttttgagacagagtcttctgtcgcccaggctggagtgcagtggcacgatcttggctaactgcaacctcttcctgagttcaagcaattctcctgcctcagcctcccgagtaactgggatagcaggcacgcatcaccactcacccctgtaattccagcactttgggaggccaaggcgggcggaccagttgaggtcagcagttcgagaccagcctggccaacatggtgaaatctctctctactaaaaatacaagtcttttaagtctcccttaatctggaacagttcctcaacctttctttgtctttcctgaaatttgtatatttgaagaatacagaccagttattgtatagaatctgctacattcccgactggactgctacataaatgatactgtgtcctcaggtatcacacctggaggcccataatattcatgttcccttattcaatgatactttttttgtttttgagatggagttttgctgttgtcacccagtctggagtgcattggtgcaatctcagctcactgcaacctcttcctcccgggttcaagcgattctcctgcttcagtctcccaagtagctgggattacaggcatgcaccaccacgcctggctaatttttctatttttagtagagactgggtttcactatgttagccaggctggtctcgaactcctggcctcaagtgatccacccatctcagcctcccaaagtgctgggattataggcgtgagccaccaagcccagcttcaattgttatttgaactaattatttgtccttccttttaatcgtggttgttactcttgtgaaatagagttgagtttattggtttcagttggcatttagagtttttccccatgtatactgatctaattttatttatttatttttactatttaggacattaacatcatgtaagagtgaaaacaataaaaaagactcaaagaatgttgctccttcctcattcctgctatctcatcctgctcctcttgtacagaatcccttcttttttttttttcgctctgtctcccaggctgcagtgcagtggtgcaatcttggctcactgcaagctccgtcccctgggtccaagcgattctcctgccccgagcctcctgaataagctgggactacaggcgcctgccatcacaaatggctaatttttgtatttttagtagagactgggtttcactatgttagccaggctgatcttgaactcctggcctcaagtgatccacccgtctcagcctcccaaagtgctgggattacaggcatgagccaccatgaccagccatatataatcctttttattcatttctgatttacccattctttgtttctttttgcaaaaatccgctgatatgcatgttttattatttttttattatattattttccatttttctttacacaaaatgaatatattcttttgcactttttactttttgataatataattatatattatataacttatatagttatatataatcatatgtaacatatatgattatatcatatatgacatatgaatatataatcatatataacatataaatcatatgtaacatgattatataaataatatataacatgatttatttaatatgtaacatacagttatatataatcatgtaattatactataattataatcataatatgttataccataatatatatattatatatgtaacaatatagtataattaaattattatatcttacatactatgcaataacatactatagtatataactataatatatagtatagtatagtatatagtatagtatgttataccataatatatatattatatatgtaacataatatagtagagttaaattattatatcttacatactataacatatatagtatacactatactataacatatacagtatagactatactataacatatatagtatagactataacatatatagtatataactatactatatagtatagtatagtatatagtatagtatatagtatagtatgttataccataatatatatattatatatgtaacataatatagtatagttaaattattataatatatcttacatactatactataacatatatagtatataactatactatatagtatagtataacatatatagtatataactatactatatagtatagtatagttatatagtatataactatactataacataatatagtatagttaaattattatatattagcattccatgtgggtccataaatacactgttgtacagatgttatgcccattaacaattattgatatgattgatctcaatgctctcacattgttctaattacagcgtgtattatatttaccctgtttctctatatgatgtataagtatctcacattctacaattattttttatattttggaagcctcatattttgtttcactgattaccttatttatacctttgatgttcttcattcagcataaacaagaaagctcatctgttatctactcaacaatcatcggtcatagtctacttttctccttctccattctgctccaatttttagttgcattctttccactttgtcagaaaatattccgtttacatactatttctccaccatgtctccacttgttgtaagtgtctcataattacctgaagtgatagagcatcatttctaggtactttgtattaaagatggatctttattataaactcacagcctctctctgtccctctccctgcctttctctttttctctcggcatttgtgcatgaaatatatattaaacaaagtacagctgcacaattaaaaagaaagaaaaaagaaacaacatatgggataaatggaaaagaaagagcaacatagaacatctagaattaaacttatcaataattatattaaatgcaatgatcaaaactacgattaaaaggcagatatcatcacattggatacaaagcaaaactttaaagaagcacactttgaataaaaaggcatgggcaggtttaaaataagtaggtgccgggcacagtggctcacgcctgtaatcccagcactttgggaggccaaggggggtgtatgacctgaggtaggagtttaagaccagcctgaccaacatgatgaaatcccatgtctactaaaaattcaaaattagctgggcatggtagtgcatgcgtgtagtcccagctactcaggaggctgaggcaggagaatcatttgaacctgggaggcagaggttgcagtgagccaagatcacaccattgcactccagcctggacaacagagcaagactccatcttaaataaataaataaataaataaaataagtgatgacactaacagtacaggcaacaaaagaaaaaaacaaattggactgcatgaaaatttaacattttgtacattgaaagacactatcagtagtaaaaaagcaaccccacagaatggaaggaaatattttcaaatcatacatctgataagggattaatatccagaatatatagagaactaaaatgaagaaaaaaaattcaaaaatgagcaaaggacttgaatagacatttctccaaagaagatctacaaatgacctacaagcatgtaaaaagatactcaacatcactaatctttagggaaatgcaaatcaaaactacagtgagataccacctcacacccattaggatggctactttcaaaacaaaacaaaacaaaaaaccacacacacacacagaaaataacaagtgttggtgaggttgtggagaaactggaactcttttgcaatgttggtgggaatgtaaaatggtgcagccagtacagacagcagtatgacagttcctcaaaaaattaagcaatgaatttcagcaatgaatgggtacttctgggtaatacccccccaaatagaaagcaagattgcaaagagatatttatacacccatgtttacagcagcattgtttatagcagctacaatgtggaagcaatagtatccatcaacaaatgaatggaaaagcaaaatgtgatatattgatacaatggaatattactcagcctcaacaaggaaggaaattccgcagtatactgcaacatggatgaaccttaaggacattatgctaagtgaaataaaccagtcacagaaagacaaatactgtatgattcaacttatatgaagtacatagaatagtgaaaatcatagagatgggaagtagagtggtggttgccaggggatggcaggggttgagggtggagggaaacaggagtgattgtttaattggtatatagtttcagttccgcaagatgaaaagtgttatggagatggatgttggtgatggttgtacaacattatgagtgtatttacactgaactgtacacttaaaaatggttaaaatggtaaatgttatgtgtattttaccaaaatttaaaaattgggggaaaatagatgaaaacagacactaatccattccccatctaacactaacataatctctcccactaacactaatcacaaaaatctgcagtggctatatgaatgtcagcagagtggatttagcaataataattattaccagggataaagagggatatttcacgataataaatgagtcagtttatcagaacaacaatcctacatttagttgaccctgacaaatttttgtttcatttatattaaagctttgatactttgattctaatttaacataattgaaaggatagattaacccacaaatacaggtaaagatcacaatacccttctcattaattgattaaacaagtacaatatttaggactattctacccaacaagatcagaattcacatttttttaggttcatacattcaacattcaacagcatacaccacagaagaggctataaaatgtttcagtaaatttacagggattgaagtcatgcaaagtatgtcctctaacaacagtggaattgcattggaagtcaataacagacagatatctggaaagcccttcaaatatttggaaattaaccaacagacttttgaataatccatggaccaaaaaaagaaagcaaaagagaaattaaaaaatattttgagctgaataaaaaagagcacacaacatatcaaaataggtgagatgaagctaaagcagtatacagaggaaaatgcatagctttaagtgcttatttagaaaagaagaaaagttagaaatcaatgacctaagcgtacaccctaaaaaactcaataaaaagagcaaagtaacaaaaggacgtgacaaagatccgagaagaaatcaataaaatagaagacaggaaaataatagagaaaaattaataaaatttaaaccagagttatgaaaaaatcagtaatactgataaaattcttttcctttttttttcttttttacccgaggatatcatcctctactggtacaaataagatgagggggcaaaagattttcaattacatgatgtcgttctcaaattacaggcaacattctaactagactgattaataaaaagagaagacacaagttatcagtatcagggacatcactactgatcctataaacactaaaataaaaagagaatattatgaacagccttatggcaataaatttcacaacttagattaaatagacttttttatttatttatttatttattttgagacagagtctcgctctgtcgcccaggctggagtgcagtggcacaatctcggctcactgcaagctccacctcccaggttcacgccattctcctgcctcagcctcctgattagctgggactacaggcacctgccaccacatgcggctaattttttgtattttttttagtagagacggggtttcaccacgttagccaggatggtctcaatctcctgacattgtgatccacccgcctcggcctcgcaaagtgctgggattataggcatgagccaccacgcccggccaatggacattatttcttgaaaaatacaaattgccaaactggcttaagaaaaaatataacatttaaatagctttatacatcttaaagcaatgattacttagcatgtatcagaatcaactggagtttgcccagttccagaatttgattttgttagtctggggtagggcataaaagtttttggacgcgtacagtggctcacgcctgtaatcccagcactttgggaggccgaagtgggtggatcacctgaagtcaggaattcgagaccagcctggccaacatggtgaaaccctatctctacaaaaaaaatacaaaaattagccaggcgcggttgtgcttgtctgtaatcccagctacttgggaggctgaggcaggagaatcacttgaactcaggaggcataggttgccatgagccaagatcacgccactgcactccagcctgggcgtcagagtgagacttcgtctcaaaaaaaaaaaaaagtttttaataagttccagatgatattatgctgctggcttattggccacattttgagaattagtgtcttcttttcctattcatttaatgtttatatttttacttttgttgtttctaaggttttttttcctggctttgttgaggtataattggcaaataaaaattgtatatatttaaggtgatacatgcaacatgatgtcttgacatatgtatacattgtgaaataattgctacaatcaagctaatcatcatatctatcacttcacacatagatgccattgtgtgtgtgtggtgagaacatttaaagtctactctcttaacaagtttcaagcatataatatagcattattaacttcagtcaccgttgccatacattaggtcaccaaaacttgttcatcttatgtaactgaaacttattgcttcttgagcaacatctctcttagcccccggcaaccaccattctactctatgcttctataagtttgactttcttagatttctcatgtaagggaaatcatgcagtgtttgtatttctgtgcctgtcttatttaacctagcataatgtcctccaagttcattcatgttgtcacaaataacaagatatcctactttttaaaggctgaataatatatgccattgtgtacgcatggaacacatagaaatgttgtctacataccacatcttcattatccattcactggtcaatggacaattaggtttattctacctcttggctattgtgaatagggctgcaataaatacagaagtgaggatagtagtagaattgctgtatcacacggtggtactacttttaattttttgaagaacctccatactattgttcataacgcattttttttgttttgttttgttttgttttttatggaatctcgctctattgcctaggctggaatgcagtgtggcatgatctcagctcactgcaacttctgcctccaaagttcaagtgattctcctgtctcagcctcccaagtagctgggattacaggtacccaccaccacacccagctaatttttgcttttttcgtagagacggagtttcaccatgttggccaggctgatctcgaactcccaacctcaggtaatccactcgccctggcctcccaaagtgctgggattacaggtgtgagccaccgcacccggcctgttgttcataatgactgtaccaatgttcaatcccaccaacagtgtacaagagtttcctctctgtgtgcctgctccccaaagaaatgagcgcaactgggaaaattatttttaaaaatcaaccatttaaagtttctggaaattgttctaagagcctgtggcaaatgaagaaatatttgttcaagaaaatcaatgaaaacattgtaaaaacagtaaaagtctgtggcatttgaaccacaacttcttcctaccctcaaccctcccagcttagcatgatggaaactcgactccaggcgtgagcagccaagagcgcagggctccttctcctccagctaacagtcgatggctacagaacctttcaaggagtggcagtccacagcatttattgccccccaaaaccagctacatgttgcagaggctaaattccaggcaagtgtggtcaagaggtttggggctccattcttccacccagatccccacaatagagtggaggctctacttatggcatgaaacactgcgaatactaggccctgatcaccctcactccagctagttcacagtttcaatgtcaggggaaggaagctgggaagaccagaggctaccaatctcatcccctatcctgctcctaaagcagagggatcactcagaagtgggctactgtctctgcccccaggctgatattttgccagggtaagaggcaaaccatgagaacagagatctctgaagccctccccaaaggaactgactttattttaaacaaactatagggaagtccatgcctaagtcacaaaccatggaggttttggtggtaagcaattaaggatattggtagcttcatgtgaaccacaagctaaactataggtcaactagtttaccagagagaaccaaagaaagaggacattaaaaggagccttcctgctcacgcctgtaatcccagcactttgagaggccaaggtgagcagattgcctgagctcaggagttggagactagcctgggcaacatggtgaaaccccatctctactaaaatacaaaagaaattagccagccatggaagcatgtacctatagtcacagctactcaggaggctgaggcaggagaattgcttgaacccgggaggcagaggttgcagagagccgagatcacaccactgcactccagcctgggcaacagagcaaaaaaaaaaggggggtgcttcctgggataaaaaaaactaaccttaaacactagactcataaactacataaactacttttacaaaaggaccccagtgtaacaggatgagactatgaagcaatttctgtctcagagcattgttgaaaacatttgcgcagtcagctagcaatgattggagcttaaagacgggtgtgatcagggaaagagactaagaaagcccctctggaaccactgtcatgagagagtgactgtgtacaggcccaaggttgcacatttcaaggggcaacaactccactaaaatagtccatctgatcactaaacaaatcagcccagggggagggagtcagggtctatattatctaactattcctaaaaatgtcctgttttttaaaaaattacaatacatgaaaagaaacaggaaaatgtaactcataggcaggaaaaaaacaacataaacaacaaaaaccatctgtgagatagctcagacgtcagatttaacaaacaaagtttccaagacagccatgttaaatacattcaaagaagtaaaggaaatcatgctgattgaagtatgatgaaaatatgtcattatataaaaaatatcagtggagagataaaaattattttaaaaaaccaaatatttccatctggagctgaaaagtacaaaaactgaaataaaaaattaaatgggcttaaacagtagatttggactagcagaagaaaaaataacaaacgtgacagtagatcaatagaagtgatacaaccagcagaacagagagaaaagaagaaaaatgaatagagccttagagacctgtgggatgtgatcaagcacacaaacgtgcatactgtagaatcaggaggagacagagagagagagaaagagagaggagaaagaaattctaggaaataatggctgaaatcatcccaaatttgatgaaaagcattcatctgcatagtcaagagcttaacaaataacaagtaggatcaacacaaagagatacacacagagatgcattgtagtaaacctgctgaagatacagagaaaatcttagaaacaacaagaaaaaaacaatttgacatgaataagggaaccacagcaggatttaccactaacttctcctgagaaacaatggtagccaaggtcagtggggtaacatactcaaagtgctggaaccaagaattctttttcttttttttttttttttttttttgagacagggtttcactttgctgccaaggctggagtacagtagcatgatcatagctcactatagtcttgaactcctggactcatgggatcctcctcctgcctcagcttcccaagtagctgagactaccagcacaccatcatgcctggctaatttttttttttttctgagacagggtcttgttatgttacccaggctcatcttaaactcctgaactcaagtgatccttctgccttggcctcccaaagtgctggaattataggcatgagccaccaagcctggccaagtcaaacaagaattctatatccagcaaaactacccttcaaaacatgaaaaataaatttaagacttttccaggcaaaaactgagagaattcattgctagcagatctgccctacaagaaatagtaaagagagtccttcaggctgaattgaatggacactaaacttaaacccacctgaagaaataaagaccactggaaaataaaattacatggatatatacacagtataaatgtattctttgctgctcatttttctcctgacttaaaagacaactgcttaaacgaataatttaaaacctatgtgttttatcccttttaatactattgtaaatgcattttttctttctttttttttaaattatactttaggttctgagttacatgttcagaacatgcagttttgttacataggtatacatgtgccatggtggtttgctgcacccatcaacccatcacctacattaggtatttctcctaatgttatccctcccctagctctccactcccccgacaggccccagtgtgtgatattcccctccctgtgtccatgtgttctcattgttcaactccacttatgagtgagaacatgcggtgtttggttttctgatcttgtgttagtttgctgagaatgatggtttcctgattcatccatgtccatgcaaaggacatgaactcatcctttttttgtggctgcatagtattccatggtgcatatgtgccatattttcttaatctagtctatcattgatggacattcgggttggttccaagtctttactattgtgaatagtgccacaataaacatacgtgtacatgtgtctttatcatagaatgatttataatcctttgggtatatgcccagtaatgggattgctggatcaaatggtatttctagttctagatccttgaggaatcaccacactgtcttccacaatggttgaactaatttacactcccaccaacagtgtaaaagcattcctatttttccacaacctctccagcatctgttgtttcctgactttttaagaattttttcttgattttattttcagagtgttcattgttaatatatagacttgcaaatgattttttatattgaacttgtctcctgcgaccttaaagaactcttgtattcattctgatagctttttagtggattccttagtgttttatacatagaagattatgtcatttgtaaatagagatagttttacttcttcctttccaatgtggatgtcttgtaattctttttcttctctaatttctctggccagaacctccggtatggtgttaaatagaagtggcaaaagcagggaggccgaggtgggtggatcacgagggcaggagatcgagaccatcctggctaacacggtgaaaccctgtctctactaaaaatacaaaaaactagccgggcatggtggcgggcacctgtagtcccagctacttgggaggctgaggccggagaatggcgtgaacccaggaggcagagcttgcagttagctgagattgcgccactgcactacaacctgggtgagagagcgagactccatctaaaaaaaaaaaaagaagagtggcaaaagcagacatctttctctttttcctgatcttgggagggtaaacattcagtctttcactattaagtaggatgttagctgtgggtttttcataaatgtctggtttcaggttgaggaagttttcttctgttcctagtttaatggacattttttatcatgaatgataacttcctgagaccaaactgaagaatacgtaaatgaaggatattggtaactagatcagattggtgaattatatctgttgttgaactgataaggtagccagaatgctttctgtcatagaggcaagttgagccatccctggatgcattggtatgttaatatcaaggagagaaccatagtacatatgttcgtctccactgaaatttgtttgtccccatctccttaaaccacacccctgccccattgaatctaggaagtcatagaatttacaaataaatgagaagttcctaataaagaactattgtcagacactcttttatccttggactcaagtgggtgatcataaacttcagaaatacttaattgtatgtcattaattgcaaattaaaacatcaattgcagaaattgcaaattaaaacaacaaagagatatcactacatacctattaggcaaaaattcaaaacaccaataacattacgtctgccaaggatgtggaataacagaaactctcattcatggctggtggcaatgcaaaatggtacagccgctttggaagacaatttggcagtttcttataaactatactcttaccacatcacccagcaatcaagtgtcttgggatttacacaaactagttgaaaacttatgtccacactaagacctgtacgcagatgtttgcagctgctttattcataagtgttaaaccttggaagcaaccaagatgtcctttagtaggtcaatgggcaaataaacagtggtacatccagacaatgaaatactattcagccctagaaagaaatgtgctattgggccatgaaaaggcatgaaagaatcttaaatgcatatcactaagtggaagaaaccaatctgaaagggctacgtactgtatgttttcaactctataacattctggaaaaggcggaactatggagatagtaaaaagattaggagttgccacaggttaatggggagggagggagggatgaataggcagagaacagaggatttttagggcagtgaaactcctctacagcatactgtaatgatggatccacgttaggatacacttgtctaaacctgtagaacatataacgctgagagtgaaccctaatgcaaactataaattctggttgattatgatgtgtaggttaatcaactgtattaattttaccactccagtgggggatgtgaataataggggaggccaggcaagtgtgaaggtagcacagggtatgtgggaaatctcagtggcttcctcttttttctttcttttcttttttttttttttttgagacggagttttgctcttgttgcccaggctggagtgcaatggcacgatctcggcctactgcaacctccgcctcccaggttcaagcaattctcctgcctcagcttccagagtcgttgggattacaggattctgctaccatgcccggctaatttttgcatttgtagtagagactgggtttcgccatgttggccatgctggtttcaaactcctgacctcaggcggcctcggcctcccaaagtgctgggattacaggcatgagccaccgctccgggcctctgtgccttcttcttaattttgctgtgtgtgaacctaaaactgctgtaaaaaatgaagtctactttttttcaagttaattgaatgaaaaatcagtcagtaacagaatgacctcaaaaccaacaaagaaattgcaatgcagagtatttgagtctgacatctaacagaaacactataaaaaggaaagaattactactatccatgagaatgtttgggctttttcaaaatgacaatattttaaaggacgtagttcaacataaatcattagcttattaatatttctatgccattttaggttaatacgcaaactcagtgtgtaatattttaagaattctaacgcaaaatattgagccatctgtaaatctaagctgctttctatgtgactaccaaaaatctactctggtactttttgctgtaagatatttgtaattaattttcccttcacatgtataatctactccattaaacctaagctgtgagacccattattttctaatatccttccaagagatctggaggaaggtactagagtggcgaagggttctgccctggcacccactcgccagcagcgtgaccttgggcactttttccgtctcagtttcctgacctgtaaatagattaaatcaacagtcttatcccataggatttttgaaaaatgatgaaattaattaataattcaaagctcttagaacagtgttgggtacagagtaagcgcctattaatatttattgatattattaatacaattttgacacttaaaagtgagtttggcttgtgtaattattctttttaccctctggtataaaatgtttacccctgatgtggctgacccctatgtgaatagatacctcagcttctctttgtctactctctgcctattttgaaacacattgtgccatcagcaataaaggaaataacttcacagagcattagcagctacttgaacattccaggcgtggtcccagctgaaagcactggcacatgtggtcccccagcccaggattcccttccctcccctttctttttcttttcttttgttttttgttttggtttggttttttgagacggagtcttgctctgtcacccaggctggagtgcagtggtgcaatcttggttcactgcaacctccgcctcctgggttcaagcgattctcctgcctcagcctcccgaggagctgagattacaggcacccaccaccatgcctggctaatttttgcatttttagtagagacagggttttgccatgttggccaggattttctcgaactcctgacctcacgtgatccacccacctcggcctcccaaaatgctgggattactggagtgagccaccgcgcccagcctctttcctctcctttccacacgactccttccctccctccactcaactctctgctcaaatattgtcttctaggagtgacctgtcctagtcccccaattctcttttatactatcaatcagcacctatgattatatttttgcttgttctagtttcttcactagaatgtaagtttccaaagggcaaggactgtatctcattcactctctctcttctgcttccagaacccactgtgattagactagacttccttggcctccctatggaaaagagcaccctcttcttggtctcccttattttgctttgattttctttacagtatgcattatcatattgtttaattatttgtttttcatgtccctaaaacataaacctcatgtctccagtgcctaaaagacgtggcatcaattagacacttaataaatattttattttttgtctatttttattttattaatttttttattttttatttttatgtgtacatagtaggtggatatatttatgggggtacatgagatactttgatacaggcatgcagtgtataataatcacatcagagtaagtagagtatccatcacctcaagcatttatcatttctttgtattaataaatattttaatgaataaagagtacctggtataaataggccctcagcaaatatcccaagtgaatacattttccagaagatgtaatggaaggactaaaggaaggctatatttcccatggtcaatcaaaacataataaaatttttatttaaaaaattccattatatcttacataagacaaattagttctattataaagccatgattgctaagctcagataggccctcaacagctcagaaattctattgtgttgtcaacttattttctcattttccatgacaattattccaaatcttctctcctcttcatccagcccctccttttcctacactcccagtagataaatccatatatcagtaatctatttctgtataacaaagtactccaaaacttagtggtttaaaacattaaaagcatttattatctcacagtttctgttgctcaggaatccaggcataaattagctggatgcctttggctcaagatctctcatcaggtttcagtgaagctgtcagtgaggtctgtgatctcatctgaaggctcaacgggggtaggatcctcttccaagcttactcacatggttgttggtagtgttcagttccttgtaagtggtcagttagaggcttcccttagtttcttgccttgtgagcctttatttaggattgcacatgacatgaaagctggctttcctccaggtgcacatgcacacaagaaagtccaagccagaggccactgtccttagattctctaatagcagaagtggcatctcatcactccaccatgttgtatttgttagaagccagtcactaaggccagaccactcttaaaggagaggattccacagggaatgaacaccaggagacagggcgtcttgtgagatcttagagtctgcctagtgcacaccacttccaattttacagagaaaatagaggccatggcattagaactttctcatcttctacccattcatctgcaccaccctgtcatccttttctgctgtagcagtggagatgcgatacttccacctgtgctttggttcccatttcgatcctttttctcagattattgagagccagtctgagaggggtaaattgattattacccctttgttgcacagtcaacctctcaactcaactgcatcattcccaacagcctttcagtggactcaagactcttcccacagaagcaaaccagcaaaaacacaaacaaaacaaaaccaaacctccacttcccttctctttgcaatatgtatcattttatttatctcctttatttatttttccaaataccctccctcctcaaaagaaaaaaaaagctgtctgttgtcacttgtcagtacactccaagatagcttttggcagaattacttgactaactgttgctggtgttgccggtgacttcatgaaactcaatgaacattttttagtccctgtgttctcttaattttgaatgctggtgactgctccatcctttctgaaaccccctcttcccttactttctaagacaatgctctcctgtttcaattcctgtttctgtagctgccccttctctagtgcttgtgtgggattaccttctcctattcatccctttgacgttggagctcctcggggcttggtcctaagatttcccttctcactctgattttctcttttttggtgaccttacccaagtccttgtttcaactaccatctcaatgcatatgactcaccaactgacttctgtagcccagaattgtgtacatattgacccatttgacatttcttcttgatgtctccaaggtacttcaaactcaatatgttcaaaactgaactcattattttcaccccaaacctgttttttttttcttgtgttctctagtgtatttgtttcctagggcttactgtaacaaataaccacaaactcagtggcttaaaacaacagaaatatattctctcacagttctagagacaggaagtctgaaaccaagtttcaagagttggcctccttccaaaggccagactgaagggaggatccttcctttgttcttccaacttctggtggctccactggttcttgtctggcagccacataacttcaatctgtttctccatcttcatgtggctttctcttctcctcttgtgtttcaaatctccctctgcgtttctcttagaaggactcagaataacccaggatgatctcacctcaaaatccttaattacatctgcaaagacccctttttaaaaataaggccacactcacaggttctgggtggacatgtctcttgggaggccaccgttcaacccagctccatgaatggcacctttatcccgttgttcaggccacaggaacctcataactgtgtttgtgctatcttttcacttgtttccagtatccaaagcatccgcaagttattttaattcctcagcatctcaggtatctgtccacttctccctctttaccactaccttgctcaagctatcatcacctatcacctagagtctgtaacagcctcctgtctatccacagccactcctgcatcctactgtgcattctgcgcactgtagacttgtttcaaaatgcaaatctgatcatgctgccccactctgccttatctccacgtgttcattgttcttaggaaacagacaagtgtaacacagtctatattaaaatcaaaatgaaatgaggataagctgcaaactgtgaagcttttgggatggtaatacataccaggcagggacatacttggtaaaataagaagaatacctacaagaatggatgactttgaacttgacctgcaacaatttaatataatgaccttcctaggtcccttctctactctatagaaaacaaagccactgggaattgatgctaaaaagcatctgtctcccttcaacactcatcatgcagtgaattttgagacggctgggatcccctcagagtatttctgccagcagcatttaaacttgtcaagccttctttctccatcctcatcttttcttataactcttctgctgtggtacctgaatgtgagctgtccaattggtttcaaaatgaacggactccaagttacctacttttatattactgtcactacaaagcagtcctctccaatttatgttctaaaaatagctaagtggagaccttataggtctgatgaaagcaaatctgtagcataaaaaaataaggtgttcaccagtcaatcataaaccaccctctgggcacctataatgtattcagcactgcgccagttgcactcccctttagcaagtgttttggccacaaaacagggagatggagtgcaaagtgattttcacgagtaaaatattccctccataatttctgttcttaggataggcttgattctgttgccataatgaacagccctaaaaccttggcagcttaaaacaataaagggttatttccactcttgctacttatccagcaggttggctgggactttccatcatgctgtcttccctcctagaccagctgatgaagcagccactgttgggacatgcctggtcactatggcggagagggaaatggctcttgaagggcttgcaccagtaattaaatgccctggccaggaagtgagatgtgtctctttgtctgtcagctcactggctagaatatggccccacttaaccataagaggcccagaaaatgcattctatgatcttctcagacagagagagcactggaaatatttgcaaacagcactaaagatgaccacagtctgccctctggtcactaaatatttggactacccttctttccagcaagcaaaatatactcaccaccctccccaagagaaataatccaaaagttccacccaatgagggcatcagacttgaagtcccaaagtgctgggtggggcatgagcatctctactgcaggtccaagaaggcactctccatccagagagagtatctgtccattctaaaattacatctgcaaagaccccttttttaaaataatactcacagattctgggtggacatatctcttgggaggccaccgttcaacccagctccatgaatggcacctttatcccgttgttcaggccacaggaatctcataactgtgttcgtgctatcttttcacttgtttccagtatccaaagcatccacaagttattttaattcctcagcatctcaggtacctgtccacttctccctctttaccactaccttactcaagctatcatcacctttcatctagagtctgtaacagcctcctgtctatccacagccactcctgcatcctactgtgcattctgcacactgtagacttgtttgaaaatacaaaactaagctaaaagccaagttatctgtcccacctcccaagctattgccccactcccaatatacaaaaatagaacagttgtcggctcaccgccatcagcacaccttcagagaggagaaggatggaaggcactcagacactgactctattttcccttctctgtcgtatttattgcagtgaacttttacatagtgtcacgtatctgtcaagaatgcccgtaagcacggtacatatattaattgatttaaccctcactctacagcactatgggaaaggtactgttgtaaaccccatattcagatgagaaaactccaacaacttatttgtgcaaggcccccagctagtccacgctacagctgggcttctgcctgaagtagccgagctccagagtctgctgctaaccattataccacactacctctgcagaatggcttcgtctttagagattcatttacaagtaaaattccaaattaaacttgcaacttaaaagtggaaaaaatgcttctcatgagaagtacatctgaatcttgaagggaacagactggttcctggagttgccagcacccacctctcaatgtgcacttgcaaactccccagtgggttgctgtgtgcacccaggaggagcctgtgggacaggcacacctctcagagttggggtcccactcaaatgtgggatgctcccaggtggctgtgtcagaaaagctccaggtagaaaggactgcagctttgctctactgccagccaaggaaaccacctgtgaacaagtacacactcatgggagtggaaagggaaatggactttctgaatccaacacaggctgtgttttgaagaccgcttcatgagtcatttatgattttatggttgtaatttcccaccacttagacctaataattttgtctatttagacccaaggatcaccacaaaccccattccttatattcataagttctttgtttttattcttctttagatatgtattccattaactaaagcgtgcatttttaagacacacccatgagttcctgactctaaggtttttccctacaacaatctgcaaataatcatttcactatctttaacatctttagtttagttttaattatttatttttatttatttatttattttgagacagggtctcgttctgtcacccagactggagtgcagtggctgaatcatagctcactgcatccttcacctaccaggcccaagcgatcctcccacctcagcctcgtaagtagctgggactacaggtgcatgccactacacctggctaattttttttttttttctggagacgggcatctcactatgttgtccaggctagtctcaaactcctgggctcaagtaatctacgcacctcagcctcccaaagtgctaggataacaggcatgagccaccatgcccagccatcacctttagttttcaagcaaagaaacagacaacctgaaatttcccatagtaagtggatcttatcctgccctgatgcttacagaatttgtcttggtcctgattgctttattctgatttgatttgttttgttatagtaagagaatccttttagtgtataatttccagtcgtccttctattttatctataaatttggttttgttacgcttgttttgtttttctcaggaaaacccactgcgtgtggtatcattactgtcggtttccatctccagcaccggatcacggctgcccccccaacctctgcccctagtacttgatgcgtttcccccagacctcatctccatggcagcagtacagatttgattccaacgggcttctcaggcgggttttttttgttttgttttcttttttcgagactgtcacccaggctggagtgcagtggcgaaatctcagctcactgcaagctccgcctcccgggttcatgccattctcctgcctcagcctccctagtagctgggactacaggcgcctgccaccacgtccggctaattttttgtatttttagtagagacgaggtttcaccgtgttagccaggatggtctcgatctcctgacctcgtgatccgcccaccttggcctcccaaagtgctgggattacaggtgtgagccactgcgcccagcctaggcggttttcattttacaaagatttttccctcaacgaattctccaatatctacttttcccctctttctgttgtttaatgctcttgtctttgaccacttgggtctcttgtttgaactcttgtttcgtaaagatgtcctctttaatttctttgagggattatagaattcataactaaaggtttcttcaattatatgagtcaattcttgttcaggcatatattcttttttttttttttttagttattgataaaaaatggtttgtttgtttgtttgtttgtttgttttttgagatggagtctcactctgtcgcccaggctggagtgcaatggcaagatctccgcctcccagattcaagtgattctgcctcagcctctcaagtagctgggattacaggcacccgccaccacacccacctaatttttgtatttttagtagagacagggtttcaccatgttggccaggctggtcttgaactcctggcctcgagtgatccacatacctcagcctcccaaagtgctgggattacagatgtgagccaccatgcccggccttataaaaatgtttttgatcgcctgtaatcccagcattttgggaggctgaggtaggcggatcacttgaattgtgcctttggtgttgatattagattaatgctggccccaaagaacgaatgatgaagtgtttcctccacttctattttctggaagagattgcgaggaactggtattactttttccttaaatgtttgatagaagtcatcagtgagattttagaccatctatgtgtggtgctttctttccttttttacttgaaggttattgttgattcaatttcatttatgtatatagggctaattaggttatctctttcaccttgtgtgagttttggtagactgtgtctttcctggacatccacatgcacaaaaatgtccctagaaacagatcttatacctttcacaaaacgttttttaatttaattgtttttgagatggagtctcactctgttgcccaggctagagtgcatcaccctgatcacggctcactgcagtctctgctgccagggctgaagcaatccttccaccttaggctcccaagtatctgggaccacagcaatgtgtcacatacctggctaatttgtaaattatttgtagagggtgtcactatgttgccctggctggtctcaaactcctgggttcaagtgattctccagcctcagcttcccaaagtgctgggattacaggcgtgagccacctctcccggcccacaaaaattaaatggatcatagccctaaatgtaaaactataaaacttctagaagaagacatggaagaaaatatctttgacctagaatctggtgataagttttttgttacaacaccaaattcatgtcattgatacatatgtgcacacggctgttgtccagagaggcaagaaacaagagattgaggctgggcatagtggctcatgcctgtaatctcagcactttgggcggcaggggcaggtggatcagctgaggtcaggagtttgagaccagcttggccaacatgacgaaaccccatctctacaaaaaaatacaaaaattagccaggcatggtggcgggtgcctgtaatcccagttactggggaggctgaggcaggaaaatcgcttgaacctgggatgtggaggttgcggtgaactgagattgcacctttgcactccagcctgggtgacaagagtgagactccatctcaaaaaaaaaaaaaaaaaagattgaagcacccctcggagccccttctgtcagctataattccttactctgtctgcctgcacattcattgaagacaaatctgaaaactaaacagaaataaacccttaagctccagaccgtttacataccgaaagcatgttattcaaagcactaggctatcaaatggatgtcacatccaatttgtttaaacagacacaatatgtgaataatggtggacaaatatatcgttggacaagtttagagtcatagatttcttttatcctaaagtcacaaaagctcaagtttaactctaaacaaacaaaactgtgaattgaaaaaaaaaactttggccttactcaagagatttttctgttgaatttcctccaatagtcagtaatggatagattaaatcttcagaaaaataaaaaaagtttgtgtgtttaaagcaagatgatttctttctttgtcaatattttttatttcaataagcttttggagtacaagtagtttttggttacatggatgaattgcatagtggtgaattgtgagattttagtccattcatcacacaagtagtgtacattgtacccaatatgtagtttttagtctcccacctccctcctatcctccccattcttagcctccaaagtctattttacccctctgtatgctgtttcatatccacagcttagctcttcctttttttgtttttttgagatggagtcttgctctgccgcccagactggagtgcagtggtgcattcccggcttactgaaacctccgcctcccaggttcaagcaattctctttcctcagcctcctgagtagctgggattacaggtgtgtgccaccacgcccaaataatttttgtattttttaagcagagatggggcttcaccatgttggccaggctggtctcgaactcctgacttcaagtgatccgcctgcctaccttggccccccaaagtgctgggattacaggcgtgagccaccgtgccgtgccttagctcacacttataagtgagaacatatgatattcagttttctgttcctgagttactacacgtaggacaatggcctccagctccatctaagttgctataaaagacgttattttattcctttttatggctgaatagtattccataatgtatgtatgccacattttctttatccactcattggctgatgggcacttaggttggttccatatctttgcaatggtgaattgggtaaaacaagatgatttttgttaatagagttgaatgttctcatggggagcagttagaaaacgggtcaagtggctgagtgcagtggctcatgcctgtaatcccagagatttgggcaggaggattgcttgagcccaggagttcaagaccagccaaggcaatatagtgagaccccagtttctgcaaaaaaatttaaaaattagcaaggcatggtggtgcatgactgtggtcccagctacttgggaggctgaggtaggaggatcgcttgatcccaggaggttgaggctgcaataagctatgatcatgccactgtactccagcctgggcaacagagcaagaccctgtctcaaaaagaagaataagaataagaataagaaggggaggaggaggactacagagcaaagtctttaaggttttaatggaaaattcttcacctggaatactattcccagtctgattatctttcaaaattaagggcgggatgacagatgcagtatatttcaaggagtcagcaaatatactgcattagtgaagaaagacgccaatgcgtgtatcagtacattggtctcaataaacagattatatccctaatggccttagctgggacacgggaggaaggaattgctgctaagggttttaccttgcaggagggagcaaagtggaaactgatgaactctaagtctcagtagaatttcaccattctattggatcattggtccaacacaactgaatcatcaatcccaaggaaacccagatcaccatttacttgggtcactctcctcccagcagtgagaggttgtctgcaccatctggaaaggtaagatgtagatgtgatgtagtctgctgatgagacttcaacagttgtgctttccagaccactgaaaacccaaagtattatggcggaaccagtatagcagtttcctcttatccacagtttcactctctggggtttcagttacccacagtcaactgcagtttgaaaatattacatggaaaattccagaaataagttttaaaatgtgcactcttctgagtggcatgataaaatctcacattgccatgcttcatcttgcctggacacaaaacagccattagttcagtgtaatcacacagcctacgctacctgccagttagtcacctaggagctgtctgggttctcaaaccaactatctcagtattgccgtgtttgtgttcaggtagcccttattttagtaaataatggccctaaagtacaagaggggtgatgctggcatattgttataattgttctattttattatgagttattgttattaacatattactgcaactaatttataagttaaacattatcataggcatgtatgtataggaaagcatactatctgtagggtttgataatatccacaattccaagcatccattgggggtcttggaatatctcccttgcagataagaggaaactactgtacctggcacaaaaaccttcttttgaaaattaaactaaaggcatgctgtattactctgttctcatgctgccaataaagacttaccagagactgggtaatttataaaggaaagaggtttaattgactcacagctctgcagggctggggaggcctcagaaaacttacaatcatggcagaaggggaagcaaacatgtccttcttcacatggcagcagcaaggagaagtgcagaacaaagtaggggaaagctccttaaaaaaccatcagatctcatgagaattcacgatcacaagaacagcagcatgggagtaactgcccctgtgattcggttacctcccgccgggtacctcccacaacatatggggattatgggaacgatgattcaagatgagatttgtgtagggacacagccaaaccatatcacatgcacaaccttttacttaggtgagttctgttgtatccaaagctattcaaggtgattattactagtaccatgccttctgtgttttctggaccgaattcacactagaatcctcttactcagcatagagccaatttcagcattgtcctgcctcagccacttccaatactgcatatagaaatacccatgcaccctgaagagcctttcacaaggctctctcctgatacttaatgacacagggccattttctcttcattaaatcatgattttaaaacatacaacaaaatgtttaaaaccaaaacagggcgggcgcagtggctcatgcctgtaatcccagcactttcagagactgagccaggtggatcacttgaggtcaggaatttgagaccagcctggccaacatagtgaaaccccatatctactaaaaatataaaaaattagccaggtgtggtggcgagcaccaggctgaggcaggagaatcccttgaactgggaggcgaaggttgcaatgagctgagatcacgccactgcactccagcctgggcgacagagccagactttacctcaaaaaaaaaaaaaaaaagcaaaacatatgacaataaaacctgataatttgctaaacatagaattactagatctgatatatcataaaacattaccacaaccataagcagaacagagcaaagtaccatgatggttacttttatgtgtcaactttgaattcctggtttataaaatgatttatagctttgcattcaccaaataggtaaaactacacttttaagatgacaaactgggccaggtctggtggctcacacctgtaatgccaataattagatgggaggatcacttaaggccaggagtttgagaccagcctgggcaacatagtgagaccctgtttctacaaaaaataaaaaattagctgggtgtggtggcatgcacccgtagtcccagctactcaggaagctgagatgggggattgcttgagcctaggaggccaaggatgcagtgagttatgattatgccactgccctccagcctgggccacagagtgataccctgtctcaaataaaatttaacaattttaaaaactagctgggtgtgatggcacatgcctgtagtctcagctacttgggaggctgaggtgggagaatctcctgaactcaggagtttgaagttaaagtgagtcatgattgcaccacttcactccagcctgggccacagagcaagacctcatttcaaaaaaaaaaaaaagacaaactgacttggtaagactacttaaaattaagaagaccttcctttttggccaacgttccaacatggtacataaaaaaaaagacctcggttgtaagttttgtgggggtttttttggtataaaattatcctaaatttctagtctttatttaagatgaacataaattggctctatagagttttcactgaataattaactaaggattcagcttctcatttgtagtaagattgaaaaagataaataaatcaggcctgtgaccaatttaccccaaaatacaatttcttcattataaagaacaaaacaggaaagaagttaaagaactcccttaataaaagcactgaactgccacaagtctaatagactattagagcctagatgaagatggaaaattacctaataaaaatcgcaatttgcatagatttgccccataattacaaaacttattaagttccattttcccagatactataatggggttcacctttcatttaatgcaattcgtgatcactgactacttcaggcagcaaacgttggtaaaatcaaatccataattacatttttggttcatatgtgaaagactgaaatattcactaactgatctatatactatttgttaaaattaagtagaatgaaaaattctgaagagggttttactcaaatctttaactaccgttttcaagcctttcgctccattggctctgtccaaagcgaggttatgaaggttacaaaaccgaaagaaaacacttgctttgggtctatattcattccatctagttcaatacagtacatgtttattaaaatcgtcccatatgtgtggtcctgtctgaattaagcaggtgggataactgccaaatgtctgttttatcctgaatcctgtaagtagcaagtgccttttggttctgtggcagactgagaccagtaaggccgccagtgaatcatgcctccctgggtccactgtcttttcagtgtaattttgtgacccctcccatcaagatgatgggtctatttccccatcacctgaatctaggctgggcttgtgacttgctttggccaatgaaatgccacagatgttcagctgggctatgagaaggcctatagcttcctctttcccctcttgcaatattcctgctgtcaaggaagcaagactgggctagacccagtttcaggagaggcccagcagatagcagacacgtgaggaggccatcatggattcttgagctgccagatgaccacagtaacatgagtaaccccagaccagagcaacagaaaacccgcccagctgagcccagccaacccatggaaataatattacataaataaattaatgaaaacatatttgttgtttttaagcaccccaagtttggggatggcttaagcagccctgggtaactgacaccactgacaccatctccaaatccccagtttcccagaagagagtctctactgttctggaaaccacaatagtgggtgtgactgtggggaatggtccctgaaagcacaaatgtgtcttcttttcattttttcactagtagttattgctactagttcaaatgcactattcctgttatcttcatcagtcacaataacatttagggttatagaagatttctaggtagaaataacctacatatggagatacatgcagaacgaatttcagtgtgttccttactccagtgaagtcttgcaaagtggtcttaaagggcctccacatctgcacacttccaccttggctgtaattgtgtagcagactcccaaatacacaagttgattgatagtttgattggttaacttgttctgaagtcatatccattgatatttgtttgaatgtcattcttggagcgcagagaggaaaggtcctgtggaaggttgcgcactgtggggctggctccccagtccaaccaatgaggactcccacttccatgccccaataccttttttttttttagagacagggtcttgctctgtcacccaggctggaccacagtggtgtgatcctagttcactgcaatctcaacctccgaggctcaaatgatcctcctgcctcagcctcccaagtagctaggactacaggcatgtgccaccatgcccagttaattttttaatttcttttttgtagagatggggtctctccatgttgcccaggctggtctcaaactcctgagctcaagcgatcctcccacctcagcctcccaaagcagttgggattacaggtgtgagccaccgcacctggccagtctccctcctcttaactgcttcctgccttcccttcccaccagacttggtttaatctctctaggccctgagttccaaaacccatctcagattgggttaaagggggaattcactctaactgtcagaaaagttatcaaaaacttgagaactgaccaaagagatttgccgggggttctttcagggcaatcctggttttgcctctttgattgactttccgttgcctgagttgttttacatctctgcaggggcagaggtgaatttcgagatttttttggtaggtatgcaaataactactgaacagtagaaaagataaccccagctacaggtttgtggactgcaggagattagccagtttgtgtgaccctgccctaatatccctttactaagttgtctaaaatacccagtccctcaaatgcactaaaccacttttagcatcttcctgaactccacattaattaatgagtccaagacaatctttggcacttcctttttttattgctgagtcatcttatttaatcttttgtgaattataccttaacataaggcccaaaaagggtttcagagaagccaaagactggaaggactcagcctcctaaagcagccaccacctcccgctgctccgggccacgaagtctctctctctctctcttttctgtctctctgtctctctgtatgtctctctgtgtctctctgtttctctgtccctccatctctgtctctcttcgcctttgtctttgtctctatctctctgtttctttctctctgtctctctctgtttcggtctctgtctgtctctgtctctgtatctctgtgtctttgtctctctgtctccctctttgtttctctctgtctctgtctctttctgtctctgtctctctttgtgtctctctgtctgtctctctctgtccctgtctctgtttctctctctctccattgatcccatgcctgcctctgccgcactctcccctggacagcctggccctctccccaacaccctaaggggaaatggccacccacagctctccagtttgcatattctcgatttagaggaatggcccagatggaccagagtccttaaatccctttccaaggaagagactgaggtcactccaacatgcttccagcctctgcttcttgaccactggaagataaggacaaggatgtgaagtttctgcatttgtatcaccaaaaacatcactggagttcctagggactgtggtggccaccccgagatttccctgcccttggtgcctggtggagagctgagccctggagaggatggaggctgggaagggggctgtggtgttgtgatggggtcagtctccctcttacctccggagccacacaccctttgccattcaccactgttttctcttttttgttcttgattaacattgccaaaatttaagtcattttacattttttcaaaagagccattccttatattaaaaattctactctaggccgggcacagtggctcacacctgtaatcccagcactttgggaggccaaggcaggtggatcacctgaagtcagtagtttgagaccagcctggccagcatggtgaaacccctactaaaaatacaaaaattagctgggcgtggtagcgcacgcctgcaatcccagctacttaggaggctgaggcatgagaattgcttgaagctgggagatggaggttgcagtgagcgaagattgtgccaccacactccagcctgggcaatggagtgagactcttgtctcaaaaaaataaaaataaaaataaattctactctagttcttttatctaatttattgtttcctgattttgtctccatttttctttttcttagctttattgtattggttttctagcttttaagggatgctaagttcatttctttttaccctctcttgcctaataatggaaacacttcattcccatcctcagagcaaaggttcagctgtgtctctcataagttttggagcttcctgttttccaagttgctaacttctaaggatgctggaactgttattatatttgtgtttctttctggacagaaggggcacctaaaaggcttgtttaacttccagggtttgagtgtttaaaatcgaccttttgtagctgatttctagttttgttacattgtcgtcagaaaatgtgccttgtggcccatcctgctgcatggaactaaattttcttgttgtgcctatttcatgggttcttggataagatgatcatacacaggccagaacgttccatggctctacgtcaatcttattacaatgcctctaactcttttgtttttcctatttgaccaaagatggagaatggtgtgttaaaccatctcattatgattttccttaggataatttattcttgaatttcttctagtttgctttatacatttcaacctcagtaatttgctacatctatgttattgatatcaacatcttcattgtcaattatagtttctgtaccgttaatattctgacctgaggccaggtgtggtgactcactcctgtaattctagttcttggagagtgccaggtccaacccgcagaccctgctgaacgaaggatgaacaaatgcactcagacacagatatccagtgaaagagcaggctaggggaccgggccacccacagacaccgaggagggtgctataaagagtcagcagctgtggccctcacaagctggccctgtgagcatttattcagcacagatttaatgacaaaggctttgagtcaacacacttgttggtaattaacatggttgccttccccagagagagcagtcctgcacatggatgattaaaggccaggttccaaggcctaagtaaactaacttatccagatcaatttctttacatccccttgctatctaacctaagttcttaagagaattcagctgccttcagccaaattttctttcgaagctttgcaaacccctggccttccaagaaggtttgcatcttctacaattttgccaccaccccaatctcctacaggggaggtcaaggcaggaggattgcttgagcccaggagtttgacatcaacctaggctacatggtgaaaccccatctctacaaaaagtacaaaagttagctgggcatggtggcacacacttgtagtcccaactactcaggaggctgaagtgggaggatcacttgaggtcgaggctacagtgagctgtgattgcaccatcacaccactgcactccagcctgggtgacagagaccctgtgtcaaaaaaaaaaactttgacctaaatctatatcgcatattaataacataagcccagtttaaaaaactgcatctatctaatattcattcattcattcattcaaatatttgagcacttgccacatgccaggcactatgcctggtgctggggacagagtgttgaatggaaccacaatgttcctgtcttcacagagctcctagtgaaggacagagaccatgatcaaatttagcaacaatgtagcaacaatgtaagactcgcagtctcacacacacacacacacacacacacacacaagcatccatgtaccattatatgctgtcatgcacactttcacacatgcacacagccatacactgccacacacatacttgcacacagccatacactgccacacacatacttgcacacattcatctttagccagtaaaaatatgcctggaggatggattatgaggaagggaattgtggggctgaaagtcatgggcatttaaaattgaccagaactgccacattgacactctccaaagacagtacaattattgtaagtaccaacagagcaggaacagagcaggaatgcttctctcccacacctttataaacacagaacttttgtgtgtgtgtgtgtgtgtgtgtgtgtgtgatagagtctcactctgtcacccaggctggagtgcagtggtgtgatctctgctgactgaaacctggatcacttgaggccaggagtttgagaccagcctgaccaacatggtgaaactctgtctctactaaaaatacaaaaactggtggggcacggtggctcacgcctgtaatcccagcacaggagggaggccagggcaggcagatcacctgaggtcaggagttccagaccagatggccaacatggggaaaccccatctctactaaaaatacaaaaattagccagatgtgggtggcatgcacctgtagtcccagctactcaggaggctgagggaggagaatcagtggaacccaggagtcagaggttgcagtgagccgagattgtgccactatactccagcctgggcgacagagtgagactccatctgaaaatataaataaaaaaataaaaatacaaaaattagccgggcgtggtggcgcacgcctctagtcccaactacttgggaggctgaggcatgagaatcgcttgaacccgggaggcagtggttgcagtgagccaagatcatgccactgcactccagcctgggcaacagagtgagactcagtctcaaagaaaaaaatatatatctgattgttaaaaacagcccagcatctcctcctgtcgctcttgctccctttctgtccagttgacacacctgctcccccatcacctctgcagtgagtggaagcttcctgaggccttaccagaagcagatgccagtgccatgcttcctatacagcttgcaaaactgcgaaccaaataaaccccttttctttataaattacccagcctcaagtatttctttgcagcagtgcaagacagacttaagacactggtccagtaggtgacggtaacatttttgttggtttattttatatttttttaactcataaacctaagcacctttcaacctagatttgtcttatctatttttagaagccctttacacatgctgagtattaacaccttgtcatatgtcacaaatatgtttagctatattgatggcgtggtgtgtatataagttataaaatttgaggtgccctctttttttcttccgttacctctagatttctttccacctctcagatgatgaaaatatgccccccgttttccgctgctactttagcaattcttttacttttgggtttttagcccagccagacttttgttaataataggaaggcagagacaagatttctcgccaaatggacaggcaattgtcctggcaacatttattgactaatcaatgaggcagttcgccaaaagtaaaatactattaccagagcaagggtagagaagagggatgttggatagtggaaaaaatgaacgtccattcttctgcataaaattttccttccaaatctcaaatctcagagcctatgttctttcttttcttttcttttcttttctttttctttttctttttttgaggcagagtctcgctctgtcacccaggctggagtacagtggctcgatcttggctcactgcaacctctgcctcccaggttcaagtgcttctcctgcctcagcctcccgagtagctgaggttacaggtgcccaccaccacacctggctaattttgtatttttagaagagacagggttttgccatgttggccaggctggtctcaaactcctgaccttaggtgatctgtctgcctcagcttcccaaagtgctgggattacaggcgtgagccaccatgcctggcctcggagcctataatctgagagaaaactgtaactatgtggtaatgagccgcatccagccaataaagagcttgctttatttagagaagacagactttgtttcatggaggaggccaggcttccgaactgagtccgggatgcaaggaggtggccacccagtcatgagcagaggcgctggttctcaggaaaaaaaataccccgggagtgaagggggccaatacagcatgtgtgctgtgaggaactctccatggtgaccaatttaatacaaagccaaatcctatgttttgatgtcttgaatagcttgccttgaagagaaaggttgccatggtaactctttcaaagacaatgtcttcaccatagaccagttgtttaacctgcagagaacaatctttttctctgtgatgacaattaaaatccaacaaggaggttgaactcagcagcaccagtatggtctccacagggagaccttcactaaaaatggcaaaacaggccaggcgtggtggttcacacctgcaatcccagcacactgggaggctgaggtaggaggattgcttaagcccaggagtttgagactgcagtgagctatgattgcatcactccactccagcctgggcaccagagcaagaccgtgtctcaaaaaatcaaaacaaaacaaaataataagacactccagtgaacagtattggcaagatcaaaaacattttttatagatgacataaatgctgtattggattctttttgaatcagcctctagacaggtcaggaaagaacaattacaagagggaaaatgtaaatgtttttaccttgaacatatgaaaaagtaaaaagtccacctaacagaaattgggaaatgtaggtagaaggagagggaaggcaagttagagggggttgatgtcttccctccccatggggacaggtttagagatgctactgaacatcaatggaacaagacacagaggttgaagtgagttatttgatgttgcaaagtcagccaccatcaccaacaccaacaaaatataaacaggaagagggaagagggtgtattagtctgttttcacagtgctataaagaaatacccgagactgggtaatttataaaggaaagaggtttaattgactcacagttaaacatgactggggaggcctcaggaaacttacaatcatggtggaagggaagggggaagcaaggtccttcttcacatggcagcaggagagagaagtgcaagcaggggaaatggcagatgcttataaaaccatcagatctcttgagaactcactcgctttcttgagagcagcatgggagaaaccacctccatgatccagtcacttcctactaggtccctcccttgacatgtggggattatggggattaagattcaagatgagattgtggggacacagaaccaaaccatatcagaagggaatggggtgagagcacgcaatcttcatttttcacattagacagtgttttgagaacccccagtgaaatcgaggttatagcaccagagtggctagcaaccctgccctagggagatgcagaggagctgggcgtgggtgtctagagtgtgcgtctctttttaaaaaatttttttattatttttattaagttgagatggtgtctcgctatgttgcctagggtggtcacgaactcctggcctcaagccatcctcccacctcagcctcccaaagtgctgggactacaggcgagtcatcatgcccagcctagactgtgcctttcatgggatacttcttttacccagtggacagtaaccagaaggtcctttgcatgggaagcttgtttacccagcggacagtgaccagaatgttctttgcatgggaagcttgtttacccagcggatactgaccagaagttcctttgcatgggaagcttgtttaccagcggatactgaccagaagttcctttgcatgggaagcttgtttaccagcggatactgaccagaagttcctttgcatgggaagcttgtttacccagcagagtgtgaccagaaggttttttgcatgggaagcctatttacccagcggacaatgaccagaaggtcctttgcatgggaagcttgtttcctgaggcctcccaaccagtggacgtcctggtggctgttgtctgagctctgtccagcttatgcctgcctgaccattgctctggcactgggagtccaacctcatgttcccagcatcccggggaaacgcagcctggggaagcccccggttcttcagctggaaggtgcaaattccatccaccaccagggtagggagcagaccctaggcaaggagggcacaatatgtgggagggcaggtcacacagaccggaatgaagagtcaggcagagagaggagagagagagatgcggctcacggtgtatacataagggaatggagcatgggtcactttaagttcttgggaaaatgtctgaatgctccacttatttatttttatttcaagagtttttgggccaggcgctgtggctcacgcctgtaatctcagcactttgggaggccaaggtgggcagatcacttgaggtcagtagttcaagaccagcctggccaacatgatacaaccctgtctctactaaaaatacaaaaattagccaggcatagtgggcacatgcctgtaatcccagctacttgggaagctgaagcaggatactcgcttgaacccggggtggggcgtggcaggggggtagaggttgtagtgagctgagatgacgccactgcactccagcctccagagcgacagagcgagactccgtctcaaaaaaaaaaagtttttggggtacaggtggtttttggttttggttacatgaataagtactttagaggtgattcctgagattttagtccacacagtgtacactgtacccaatatgtagtcctttatccctcaccccctcccaacttccccatccctgagtccccaaaatccattatatcactctcatgcctttgcatcttcatagcttagctcccacttctaagtgagaacatgtggtatttggttttccattcctgagttacttcatttaggttaaatagcctccagctcgatccaggttgctgcaaaagacatttttcattcctttttatgtctgagtggttgaatggtgtatttaaaggaagcaacgagagaaagtggggaggcagtctgctgggcaggggagagatgcctctaagttcttatctctggccactggcttgagccatttgggtgtggcagtcaacttcgaatgcccagggagcaacttttgctgtgttctttcattgcggggagtcagtctatggaacagagccacagctgtattaattacagttgtgacataaacactagaaaaactagcacatggcataaagtgactcagagaggaaaagagagagagacaggggaccatttctcttatgagcaattctctattacttaagtttcaaccatatgcatacattgataaaacaattttaatgtttcactgaagaccactgcatgacatctaaacatgtctgataatactcagtaggtgaatttaccagttttaaaaagacttgatcaacacgaaggaaaggggtaacaacagactgagagacgaaacagcatctccatcgtgggccatgtacggcccttacctggaaactgctggcaacagacaaactgaaaaaccactagagtcatctgagcacttgctgatttcacactaaggcattgtaaagagcaggagattgatgggatagtggttctctgaatttgtttttttctttttttaagagtcgtggtcttggccaggcgcagtggttcacacctgtaatcccagcactttgggaggccaatgtgggcaggttgcctgagatcaggagtttgagaccatcctggccaacatgctgaaatcctgtctctactaaaaatacaaaaattagccagatgtggtggtgcatgcctgtgatcccagctactagggaggctgaggcacaagaattgcttgagcctgggaggcggaggttgcggtgaaccaagattgtgccactgcactccagcctgggcaacacaatgagaccctgacacacacacacacacacacacacacacaaaagagtcatgatcgtgctctgtcacccaggctagagtgcggtggcatgatcatagctcactgcagcctcaaactcctaggctcaagtgatcctcctgccttagcctcctgagcgactgggactacaggcatgttccaccatacccggctaatttttaaatttttggtagagatgagggtctcactatgttgcccaggctggtctcaaactcctagcatcaagtgatcctcccctcttggcctcccaaagtgctgggattataggcatgagctaccatgcctggcccaattttttttaactagtccttattttttaagaatacgtactgaaatatttacagatgagatggtacgatgtctgggattacttccaagccatccagtgggaggagggtaaggatggaaccaaactggctgtaagctgataatgtggggttcatcatactattttctcgacttgtgtctatgtgtgaaatttcctatattaaagacagacacagaataggaatgtatacactaaatggcaacagtatacattttgacatcttggatttttaaaaattaaatacacgctgttcagtttttaagtaaagccctaatttgggcagattctccccttctaagggatttgaacacaaatttctgaaccctagggttggagtatgagtattgctggctccttcgtgttttttgacagggagaaaccaacagtgcacaaaatggtgactgtcaccagacactgaatctgccagcacctggatcctggacttcctagcctccagaacagtgaggaataaattcattgtgttctgcaaagctccaaggacctcctgaaatagtcctgagtccctctcagcctggtgtagcacccaattcagttgtctggctggtttgtggtgccaggccaagacaccactttgggtggggaggagaaagagaatgaagtaggaggggagggcgtgagccatgatttgggagagagaatcagacagtcagccagaaagacgcatacagtaggcacttaataaatgtttgcctggatagacaggaaccgaagtacaggcgctgaagaaaggcagtaactttttcccatggatgggagttctgctgcaaaaggacataataaaaatcgacatgataattgctgtgatctgaaagtgtgtgtcctcctccaaatttgcatgttgaaatcctaactcccaaagtgatggtatgaggaggtggggcttatttgatctggagggtggaggccgctaggaaactggctctgactgataaggccttcaggattgggatgagtgcctttataaaagagaccacagcctgtaatcccagcactttgggaggctgagatgggcggattgcttgaggtcaggagttccagaccagcctggccaacacagtgaaaccctgtctctaccaaaaaatacaaaaattagccaggtgtggtggcacgtgcctgtagtcccagctactcaggaggctgaggcaggagaatcacttgaacctgggaggcagaggttgcagtgagcagagatcagccaatgcactccagcctgggtgacagagcaagactctgcctcggaaaaaaaaaaagaaagagagagagagagatcatagagatccagctagcctgtttcataatatgaaggcacagcaggaaggcgccacccatgaggaagctgaccatcaccagatactgaatctgccagcatcttgatcttggacttcccaggctccagaaccaataaatttctgttgatagtacccagtttatggtatttttatagcagcctgaacagactaatacagtttcctacaaaaaaaccaaggattttgtaatgggaatgaatgcgaagataccaaatattcctgtgctcttctgagagtcattcttgctcaaagagcctgaagagtttccatgactcttgtctaaacttatttctaatccctgattgtttatcttttaggatttccatattatttttctactgcatttgtttgttgatttgacagtgtgaccacagcagcctagccacatgtcaaaaaggcagccacaatcataagtcaaaggaatttaagaaacagccaggcacggtggctcacgcctgtaatcctagcactttggaaggctgaggcaggtgactcacttaaggtcagctaatcgcctgaggttaggcgttggaaactagcctggccaacatggtgaacccccgtctctactaaaaatacaaaaactagccgggcgtggtggcgggtgcctgtaatcccagctactcaggaggctgaggcaggagaatcgcttgaacctaggaggcagaggtttcagtgagcccagattgtgccactgcactctaacctgggagacagagtgagactctgtctcaaaaaaaaaaaaaaaaaaaagtgaggccaggtgcggtggctcactcctataatctcagtactttgggaggccaaggcaggcagatcgctcgcaagtttgagaccaacctgggcaacacgatgaaaccccatctctataaaaaatacaaaaattagttgggcatggtggtacatctttagtcccagctacttgggagactgaggtgggaagattgcttaagcttgggaggcggaggttgtagtgagctgagattgtgccactgatctccagcctgggcaacagagccagaccttgactcaaacaccaaaaaaaaaaaaaaaaaaaaagaaagaaaatgtgacttttttttttttttttgagatgaagtctcactctgtcgcccaggctggagtgcagtggcacgatctcggctcactgcaacctctacatcccaggttcaagcgattctcctgccttagcctcctgagtagctgggattacaggcatgtgcccccacgcctggttaatttttgtttttttagtagagacggggtttcaccatgttggtcaggctggtctcgaactcctggccttgtgagatccgcctgcctcagcctcccaaattgataagattacaggcgtgaaccaccgcgcccggccaatgtgacttataagtaatcggaaaaggcattgcagacatggcaagattctgtgtaaattgctttagctgaaattagacactcaattaggcacttaattaccctgaagccttattgatgccctattagaagtggccccacccactagaatcaagtggagatgacaggtcggctccctgtagtggtgccagaagcaagactgatacagcaaccacaggcagcattcaatccacagctcccaggcctcctggcctcctgttttcctgatcacaccactcactgcacgagcattttccatctgagatcctctcaaatctgaattttaaatgtgggtttcctttcaggactgcaagcagacagtcactctgcatggccccactgtaaggatgtcaacctttagcggcagcttggaccttcaaggggtcatcagcagagccgcactgatcagctgctcggagtccagctctgactgatgaagtcagctaatggtccacgcgccccttctcattaataactcacctccatgggcagctgggtccaggtctctgcccctggtatcacattatatgataattatattcagattagtttttcatatcctttggacagagacatgctaatttgggtacttagacattaaaatcttataaagttctcgagtgattttaagtccaagttcttaaatgggatgccttattggaaagaaaacatgtagctatcagcttcctatcaagaactgactcctggccaggtgcagtggctcacatctgtaatcctaacactttgggaggctggggtgggagaatcacttgaggccaggagtttgagaccagcctaagcaacacagtgagacgctgtctctacccccgcaaaaaaaatgtaattaaaaacaaaatagtcaggcatagtggtgcctgcctgtagttccagctacttggaagaatggggcaagaggattgcttgagcctaggagttcaaggatgcaatgagctgtgattgtgccactgcactccagcctgggtgacagagcgagactctgtcccttaaaaaaatgccgattcctgggtagataggcaactgactttgatcagacgctctcctatgggtggggatgctgtctcacaacagattcagcaccatattttattttatttttttgagacggagttttactcttgttgcccaggttggagtgcagtcgcgtgatctgggctcactgcaacctctacctgccgggttcaagtgattcgcctgcctcagcctcccaagtagttggaattacaggcacaagccaccacccctggataatttttttttttttttgtatttttagtagagagtttcaccatgttggccaggctggtctcaaactcctgacctcaagtgatccacccgccgcagcctcccaaagtgctgggattatgggtgtgagccatcacgcccggcccagcatcttattttaaacggtccatcagaggaagacaaatactatatgatctcacctacatgaggaatcaagaaaagtcaaactcatagaaacagagagtaaaatggtggcttgcaggggctggggtgggagatatggggagacgccaaagggccgcaaaccttcagttacaagatgaatccattctggagaccaaccagacagcatggcaaggacagttcataataacatactgcatccctgaaatttgctaagagagtagatcctagatgttctcacgacacacacacacaaatgataaccaggttaggtgacagatcggttaactaacttagctgtggtcatcatttcacaatacagctgactcttgaacaacataggtttgaactgcatgggcccacttacacgaagattttctttattttattttattttattattttattttattttatttttcgagacggagtctctctctttggagtgccatggcacgaccttggttcactgcacctccgcctcccaggttcaagtgactctcctgcctcagcctcctgagtagctgggattacaggcgcctgccaccacactcggctaatttttgtatttttagtcgagacggggtttagccacgttggccaggctggtctcgaaccaggatcacctgacctcagatgatccacccaccccagtctcccagggtgctgggattacagctgtgaaccactgcgcccagcctacaggaagattttcttctgcctctgctacccaagctagcaagaccaacccctcttcttcctcctcctcctactcggcctactcaacatgaagacaaggatgaagacctttgtgatgaactacttccacttcatgaatagtaaatgtattttccttatgattttcttaataacatgttcttttctctagtgtacattattgtaagaatatgatatatgatacgcacacaaaatatgcattaaccatttatgtgattagtaaggcttctggtaaacagtaggctattagtagctttgtggtttctgctttttgttttgtttttgtgtttttttggagacagagtctcgctccatcagccaggctaaagtgcagtggcgcaatctcagctcactgcaacctcggcctctggagttcaagcaattctcctgcttcagcctcccaagtatctgggatcacaggtgcgcacccctgtgcccagataatttttgtatttttagtttcaccatgttggccaggctggtctccaactcctgacctcagctaatccacctgccttagcttcctaaagtgctgggattacagatgtgagccaccgcacccagcctgcttcagttaagttctgcctggtgatcattcttgtcaattctcattgcatttccctcacttaatggagaccatgtttgtgtctgtctctgtttcagtctcggtctctctttctgtctctctccctcaccctttctctccatgaattcccataggctgaagttattccaccactgaagtcttaactccagcgtccactctccaagcactgcctcctgatccccagctcccattcccacttgtgctccattcacctccatctcccctactctgccctaggaggacttcccccacctcctggctctgctctcttccctgccagacgcggacagccactagaagtccgtggtccccagccccagatgggccttcagcacaagcatcccttccactgccatcccatacgccaggggagcagactgtggctcttgagatctgtgattagtcaaaactctttcagggccagttgcagtggctcacgcctttaatcccagcactctgggaggccaagacgggtggatcacctacggtcaggagtttgagaccagcctggccaacatggtgaaaccccatctctactaaaaatacacaaattagctgggcatggtggcatgcacctgtagtcccagctacttgggaggttgaggcaggagaatcgcttgaacccgggaggcagaggttgcaatgggccaagatcgcaccattgcacttcagcctgggtgacagaatgagactccataaaaaaaaaaacaaaaaaaaaacctttttaggataaattttctcatgaaaaaaatttgtatatgtaagcttgaaagtcaactgacagtaggcagatagtagtttatgagccataaggcatctcagccccatcaataataagagtgtacttccgacaccaaaatagatatagagaccaatgtcattgggagctagaattctgcgtgtggtttgtgattaacttggtggacgaaattctcctttaaagtcgtaaagttccatgaagtctcagtctcaaggtcaggaatcttggtatcctaattttctgtagcgagctgtgggggaagcggcattctgttcctacatgcattgttctaccagcaaaaatccagtcttagcaaacacaaaatatttctttttcttccttgtttttttgagacagtcttgctctgtctctgatattacgatgtcttttcttaaaaataaaataacaaaatattcttatgctataggtttgacttttgtgcatagggtcacacctctattagcccacttaaaagaaatagaagtcgaaaaaaaaaaaaaactagaaaagaaaaaggtgaatgtggccgggcacggtggctcatgcctgtaatcccagcactttgggaggccgaggcaggcggatcacctgaggtcaggagtttgagaccttcctggccaacatggcgaaactccgtctctactaaaaatacaaaaattagccaggcatggtgtcgccctcctatcatcccagctactcgggaggctgaggcaagagaatcacttgaaccccaggaggcagaggttacagtgagctgagatcgggccactgtactccagcctgggtgacagagtgagactccgtctcaaaaaaaaaaaaaaaaaaaaagaaaagagaaagaaagaaaagaaacaggtgaatggaaactacccaacccagttctggcaggactgttaacggcccagacccttcaggaatgaaggtttgggtcacatcacaaggccagaagtcaccggctgagattcttgctgaggaccaagagagtggaaagagtagtggaagaaactatctaaacaccagcttgagccacacggctagtggaaacaaacaatcaaaagaacaacacacaacacaaaacaatttaaggcctatagttagcagagtatgttttccttgccttgaaatgaatgcatatatgatatttccctttctcattccccccgccttttttgggggcgggggtggggggacagagtttcgctctgtcacccaggctgaagtgcagtggcacgatctcagctcactgcaacctccatctcccaggttaagcaattctcgtgcctcagcctcatgattagctgggattacaggcttgcaccatcacgcccggctaatttttattttttttaatttttttttatttttaggtagagacagggttttaccatgttgaccaggctggtctcaaactgttgagctcaggtgatccattcacctcggtccaaagtgctgggattacaggcgtgagccaccatggttcccttcttatctaacataagatatactgacagtagttaaccctatatctcagcatttaagttacaggtttaagttaaggtatatgtttgggttctatgagggctagttgcattatgttaggtgaaagcatgattctgccactgttttcatttggaacttaagggtggggaaaggaggtgactatgcatgccaaggtgaccaaggggtggagtctgccagattgcaacttttcaccttggcaccagcattccagtctaaggctaggaaatccattgcctgcatggtctggccgttagggtcggccaagagctgaactcgcgtgagatttgaaagggtgaaagcgaaactgaagcccttactcttggaacgtccttttggtgggattcttcctaattttagaccccaccaaccaacagtgggctcagtccagtgcagagagcagggctgcagttccggcaaagcatggcttacgcagacctccccttcatgcaccagcttccagaatgttcccacaaactctgctctccccagccgcacctgtgtttctggctgtcatggttagttagaggctttcgacacccacattccagaactttaatttcctacattggtataaatctagtaagccgcgtgttcccataaaacataatttttttttttttgagacagagtctcgctctatcgcccaggctagagtgcaatggcgtgatctcggctcactgcaacctccgcctcccgggttcaagcgattctcctgcctcagcctcccgaggagctatgattacaggcatgcgccaccatgcctggctaattttttatttttagtagagatggagtttcgccatgttggccaggctggtctcgaactcctgacttcaggcagtccgcctgccttcaggtggttctgggattacaggcgtgagccactgcgcctggcccataaaacataattaaataataaagaggcaaaagagatgaacaaacagttcacaaaaaaggaactacagatggttcttagacaaatgaaaagatgttcaacctcatttattaccacaaagcagatgaaaatttccttcagacacatttttcatctgtcaaactggcaaaaatccataggtttcctggcaccctctgtggacaacgctgtggggaagctatcttcctacagtgcgggtggaaaagtccatgaaagagtcctacagagggtgcagttagcgacagctgtcacgtttacataagtggatgagtgacttcagcaatccaactttgcttttttattctacagatatgcataccagcacacgttaaaaggtatctatctgttcaaggatttttttttttttttgagaggggtctcactcttgcccaggctggagtgcagtggtgcaatctcagctcactgcaacctccccatcctgggttcaagtgattctcctgcctcagcctcctgagtagctgggattacaggcgtgtgccaccatgcccggctacttttttgtatttttagtagagaagtagagatggggtttcaccatgttggtcaggctggtcttgaaccctgacctcgtgatccacccacctcggcctcccaaagtgctgggattacaggtgtgagccaccgcacccagcctcaaggatatttactgcaggctttttactactgtttgcagtagtaaaaaccaagaaacaatgtaacaattgtcaaaaggtaaataaattcggctgggcatgatagcacacaattgttccagctacctgggaggccaaggtgggaggatgccttgagcctaggagctcaaggccagcctgggcaacatagcaagaccctgcctcttttttaaaaagttaaataaattggctgggcatggtagctcatgcctgtaatcccagcactttgggaggctgaggcaggggaatcacctgagctcaggagttcgagaccagcctgggcaacatggaaaaacctcgtctctactaaaaatacaaaaaattagccaggtgcggtggcaggagcctgtagtcccagctacttcagaggctgaggcacgagaatcgcttcaacccgggaggcagaggttgcagtgagctgagattgcaccattgcactccagcctgggcgacagagtgagactctgtctcaaaaaaaaaaaaagttaaataaattaagatgtgttcatatactagaatgttatgcagctgtgatgaagaatgaaagtaagaacactgttttgcattgatatggaaaggtatctaagatattgccatgtgaaaagaaaaagatgaacaactatacacagggtgtgcatttttttgtagcaaagaaagaaaaagaaaatatataatttgtgtttgttagtgtctgcatgaatcatttctaaaatgaagccaatgataagagtgggaattagcagaaacagtacatacgggtaaagatggaagagagtttctttgtatatcacttttgttttattttgtttgagacggagtctcacacggtcgcccaggctggagtgcagtggtgcgatcttggctcactgcaagctccgcctcccgggttcacgccattctcctgcctcagcctcccgagtagctgggactacaggcgcccaccaccacgcctggctaattttttgtatttttagtagagacggggtttcactgtgttagccaggatggtctcgatctcctgacctcatgatctgcctgcctcgccttccaaagtgctgggattacaggcgtgagccaccgctccggccatgttttgttttgtttttgagacagggtcttgctctgtcgcccagaatggagtgcagtggcatgatctcagctcattgcaacctcctgggttcaagtgatcttctcacttcagccgccaagtacctgggactacaggcgtaaagccaccacgcccaactaattttcctattttttgtagagatagggtttcgccatgttggtcaggctggtctcaaactcctcagctcaagccatctgcctgcctcggcctcccaaagtgctgggattacagacatgagccattgtgctcggctgtataccattttttaaatcgtgtgaatatatttctattcaaaaattaaatatgcacaaaatctaactaggtgttgatttaagaaaagcaagtcttactacaatcatattgacattcgttcaaaaagttaattgcagccaagagtggtggctcaagcctgtaatcccagcactttgagaggtgaaggtgggaggatcatttgaggccaggagttcaagaccgacctctgcaacatagcaagaccctgtctctataaaaaaatttaaaagtatctgggcatggtgacacatgcttgtagtcccagtaactctcaggaggctgaggcaggaggatcccttgagcccaggagtttgagcctgcagtgagctatgattgtgtcactgtactccagcctgggccacagtgtgagaccctgtctctaaaacataaaaaatcctttaaagaaataaataggccgggcgtggtggttcacacctgtaatcccagcactttgggaggccgaggcgggcggatcatgacgtcaggagatcgagaccatcctggctaacatggcgaaaccccatctctactaaaaatacaaaaaattagccaggcgaggtggcaggcgcctgtagtcccagctgctcgggaggctgaggcaggagaatggcgtgaagccagcgggcggagcctgcagtgagcagagatcgcacccctgcactccagccggggagacagcgagactccatctcaaaagaaaaaaataaataaataaataaataagtaattgctcacaaattcattatttttacttaaaactaatctaatatatttatatggagaagtggggtcacaattatttagctagcttcttcctctcaacctttaattttaactattttaaaccttagtcagacactcttctcctacattcaccacttactaatattttgccacatttcctttattattatctacctatttagtcacacttgcacacaagcatacacgcacttttctgggtgaaattatctgagcattagttgtagacgtcatgacactttacccctaaatactgtagcatgtagctctgaagaacaaagacacattccttacacagccacaggttactgcaatcaagaaatttaactttactattgactaattagcagtctgtatttaaatttccccaattatgccctttgtatttgtttttttcctttttattttttgttttttagtttttatttttattttattttttttagacgaagtctcactccatcacccaggctggagtgcagtggcacaatctcggctcactgcaacctccacctcccaggttcaagcaatgctcctgcctcagcctcccaagtagcttggattataggcacgcaccaccaccctggctagtttttgtatttttagtagagacggggtttcaccatgttagccacactggactcaaactcctggcctcaagtgatctgcccacctcggcctcccacagtgttgggattataggcacaagccgatgcgcccggcctatacttgttttagttttgttttgttttgttttgtttttgagacagagtctctctctatcaccaggctggagtgctgagcaatctcagctcactgcaacctccaactccgtggttcagacaattctcctatctcagcctcccgaatagctgggattacaggcacatgccaccacgccgaactaatttttgtatttttagtagagacggggtttcaccatgttggccaggattgtctcgatctcctgacctcatgatccacccacttcggcctccgaaagtgctgggattacaggtgtgagccaccatgcccagcctgttttttttctgattgacagtctggtcaatgatcacattgcctttaattgttacacctctttaggctgttttaatacacagcagttcctcaaacctctcttggtcattcttgatattgacatgtttatctgggcctgttattttcagaacgtccctaaaatctggattttccaaggtgatttctcacgaccagtcttaggttaaacatttttggcaaaggtgcttataggtaatgtgccttccaccaggatgccaaatggccccattgttggcggagaagcttgattatttggttaaggttggtatctaccaggtttcttcattgtaaaccctctttcctcttggtaattaacaagtcttttaaggtgatactttgagaccacactcgtgtcttgttccaacaacatatcactcaatggttccgcatccactgataaattttgcctatatcaattacaacaaaagtttttgcaaaaagtggttttctagttttatcatttcttctacatatattaatggccattttctttttgtgtgtgaggagtaaggggcactattattataattcaaaaatatatataaatatatattttatatgtaaatatgtataaagagtatagtaatagttataaatgtataactcaaaatgtatataaatgtaaatatatatatttatatataatatatataaattatatataaatatatatatttatgtaatatataatatattatatttatatatttatattttatatttttatatataaatatataatttatgtatatattttataattatatatttatatttaatatataatatataatttatgtatatattttataattatatatttatatttaatatataatatataatatatttatttatatatttatatttaatatataatatattattttatatttaatatataatatattatatatttaaaattatataatatataatatattatatatttaaaataatatttaatatataaatatatttatatatttatataatttatatttatattatatatattatataaatatataaatatataaattatatatttctatatatcatttatacataaattaatatataaatatataatttatatatataattatataatttatataattatataaattatataattatataaattataaatttatatatatttatatgtataaatatataaatatatataaatttatacatataaaaatataaatttatatataaatatatatataaatacaaaataaataaataaatatgtatatgtatatatttggaaacagatcttgctctgtcacccaggctgaagtgcagtggcacaatcacggctcactgcaacatccaactctggggctcaagggatcctcacacctcagtctcccaaagtgctgggattacaggtgcacaccaccatgcccagcctcaaactgttttttatttaatgtgttgtcattcattactgtcataattcctcatgctcaaagtgtcccagtgggaatgcctccaagctagctcctgtgtccctcagacatattcccatcaatcgtgaggcatgtccttgcatttagaaataagacgttgcgggctcagtgtgtacatttcttgctccagatctggaatccaccattttccatgaagccttggttccttctcgtagggaatggtacttaaagaccacagtctgggcacctggggtttttatgtcttccaggccctttttacttactcattctgataaagaactggtctttgctcttcaaacatctctcaaccatttctctaccccaccttcattttcctttcctcctcctttgggcatcaaatttttgacaaaatgttggaagctctgaagactagaaactgtgaaccttaatggtacaacatttgaaatgagacaacttcatttatttcccagcactccccacccccaagttgaaatgggttgcaaccaagctattttaaggactgcttataaagaaaggagccacaggcagtagtctcacattcagatctttttctgggaagggaggggagaagaggaggaatttcatctaatacaaatatcatttgcattttaaaagtctatgtctaattgctacttacagctatagtaaaaattgatttaatacactctaattgtatggtttgaatatgtaatcagaaatgcaaagcttgatgtcttcgattttaattttcataactaaaacctctccgttcacatatttcagtagtttctgggctgaaacacattttctaattaatgatcaagatgtgtgcaatagttcaagaccttttcaggatttggaccaccctgaataatgcattttattccacatcataattatgcttgtccctttattgaactggtcattaccttggccatagggagatatcccccagagagtcagttcgtgaattattaagtggcctaagatttgcatcatcctgacaggttaaagggccaaatttacttgactatcaaacagttttagaagattaaaaaaaattacagtttgcaacaactggagctgtactcccatgttttaataaaagctctttcctcaagaacacagtctcagaacagcacaaaagtcactgcatgactctgtaagacgaaggacaagccagtaggtacctgacctgtgaaatccaaactctggccacctcaacactttcctgttcaagatcagccttggtcaacactgtatgtcaaagtacataaggtgtatcagcagccaccaaaactcaaagcaaatggttcaaccaaaaatgggaaccttctggttaactgagaagcctataggcgactctaacttaaactgcttacgtggttttaaaaaataataataatgatatttgcaaatccaagaaaaaatattgtatggttttaattgaacaaaacaaactcaaagaaccttatacggttaaataacacattcggtgcacctatataaatgatcaacttttggggggtaaataatttttgacattactatcaccatgagaatagagatattgtcagaaaaaaaagttaatgatcttgaaatggccccaaagagttttgaatgtcctgtgtagtgaaccattcaagtcacctgcactttttcttacctttgagttattttataactttataaattgttggaaactggtagtaatgaaaatgattccttgctatagatctgcaaaggaattttgtttggtggaatgtaactgattatggccctgtggatattcaccatttttgcacttatttcagtattcctggaaaaaaacaaaaaaacaaaaaaacctctttatgtgcttttttaagtattcaaggagcaactccttcccttcaggcaaaaggtaacctgcttcaagccagctctgtaaacctccgtctgccccagtccagaagctccttatcctgaagtgttcttacagctctcagctctgttatgttccttggttcacaacactttttgattctttccatatatttccttatgttttgctgttactttagtctccccaagtcaattacgaaagtccatccaccaacaaagaagtacttcacattgtcttcaatactcctatggcattctttgaaaataaactctcttgttgctgttgtgatcattgttaggggtatgaaatacagaaagtttgtgtttgcatttttcatataccttccatcaaatcaagagttatcctccacccccaaggtcagctatggttactatgaaaatcatcatcgtttaatttatttcagctcctcttcacccacatgacccccaattctgactgccacaaggattctgtaggaaagcaccacgacaccctagagaagcagagaaaacaacagatgtggatatagaacatttgaaaaatataaactgatatctctgtcaatttctgtactttttcaacagaaaaaaagacacaatcttttcgaatgttcacggtatatttacaaaggtcatcatatcctgagctacaaaatttaaaaaaaaacctaaattaatgtccaaaataacaaaatgaggtgggaggcaggactccactccagaggtggggctcagacgcaggaccagactgaggacaaagtaaaacagggaagaggtgaaagcacctctccgtaagacacgcccaccagtgtgccatgtcagtttaccattgccatggcaacgcccagaatttaccatgcctttctatggcaacaacccagaagtgccacactttttctagaaaattctgaatgacctgccccttaatttgcatgtaattaaaagtaggcgtaaatatgactgccaaactgcccctgagctgccacctccatgcactgcctagcaggcagcactgctctgctaaccgtcatgaagcactaacactaccgcctcagtaaagctgtttcttccacccctgactcactcttgaattctttcctgagggcagccacgaaccttcccacgataagctccagctttggggctctcctgccccacatagaaagcacatacccttaccagcacggaaacaaaatagcaaagtgatccagtaagccccccaaaattgaataccttgtaaactgaaaatcactctcttggtcaaactagaaatcaacaaaaatcaccacctataaatagatgacagcaagagtgatacatgtcaaatgtcagaaaaaaaatagctgtctagactgaaaaataaagccacaatattgtatagctccacccattgaaaggtagagttttttgttgttgttttgagatggagtctcgctgtgtcgcccaggctggagtgcagtggtacaatctcggcatgagtcacggtgcctggcctgaaaggtagaattttttactcagccctcgaacctgggctatcccctgacttgctctggccaacagaacctgtgggagtgacagtgcatgaattcctgagcctaacagtctctgttttgttttgttttctttcattttttgagatggagtctcactctgtcgcccaggctggagtgcagtggcgcgatctcggctcaccgcaacctccacctctcaggttcaagtgattctcctgcctcagcctcccgagtagctgggattacaggcacccaccaccattcccggctcatttttgtatttttagtagagacagggtttcaccacattggccaggctggtctcgaactcccgatcttaggtgatccacccacctcggcctcccaaagtgctgagattacaggcatgagccaccatgcccagtcaacagtctgtttttgttctctgggaatgttgtcctggcactgccacttaaggaagccagtctaacccactgaggatgagcggccaggtgaagaagaacacggggccagcacgcactgcaggacacgagtgaggcccttggactttccagcccagctggcccagcagccaaataccacgcatcaatgaccccaggtaagcagaggaaccacgcagccaacccaaaatattatcagacataaactgttgacagattaagccatacgttttagggtggtttgtcatgcagcattagttaacaaacaataactttaattgttttcattattaatcatgacttttttttttctgagacggagtttcactctgtcgcccaggctggggggcagtggcacgatctcgggtcattgccacttccacctcctgggttcaagcgattcttctgcctcagcctcccgagtagctgggactacaggcacctgccaccgggcctggctaatttttgtatttttagttagagacagggtttcaccatcttggtcaggctggtctggtcttgaactcctgacctcgtgatctgcccgtctcagcctcccaaagtgctgggattacaggcgtgagccatcatgcccagccaatcatgacatttttaacacatcacacacgcgcgcgcgcacacacacacacacacgcacgcacacacattgtagaggacatctgctgttttggcccacccaggatccaggtccctttcctctggtcacaggtcctctctggaggactgtgggtctccaggagttgggtgagactcaggtgaagtcaatcgtgatgttaagttttgaagagaaggcaagggttaaagaaagaggagaaagagagagaggtggctctacaacaatgcaggttttatgtccagaacaagatctgtggaggtgggggaccagcttaatgccagagcccactgccagttacagtctggggtaatttacaagtctggccagggagaagggggatctggacattatggcttgctgcccaggaggatattgataaattgttgctgtgatcaggtggtttggccctttttctggtgggatgttttccacgcccgtcctggaaaacgaattgttttaatgccatttaaattaggatcaaagaggccaggcacggtggctcacgcctgtaatcccagcactttgggaggccgaggtgggtggatcacgaggtcaggagatggagaccatcctggctaatatggtgaaaccctgtctctactaaaaatacaaaaaattagccaggcgtggtggcaggcacctgtagtcccagctactcgggaggctgaggcaggagaatggtgtgaacccgagaggtggagcttgcactgagcagagatcacgccactgcactccagcctgggagacagagcgagactccatctcaaaaaaaaaaaaaaaaattataatcaaagataatctgtaggccagatgcagtggctcatgcctataatcccagtagtttgggaggccaaggcaggaggatcatttgaggccaggagttcaaaactagcctgggcaacatagtgagaccccgtctctacaaaaaatgaaaaaattagctgggtgtggtgatgcacacctgtagtcccagctacttaggaagctgagttgggaggattgcttgagcccaggagttcagaggctgcagtgagctgtgattgcaccactgcactccagcctgggagaagagcaagaccctgcctctatacagaaatttaattagataaacttacaactaaatatattaaaaacaaacataaacataagaaatactcagatcttcttttccccatatccaccatattttgactttgaggttacttgcagctattgtgtctgtacggtagaaacactataaaatggtgccatctcttcctagatccacattaggtgacttcatgttgtagctgaaaatctgccttggtgggagttttggaaattgataaacgctacaatcaggcttgaaaatatttttttaattgcatagatctctgtaatcatagcattttgggaggcagaggcgggcggattgtctgagctcaggagtttgagaccagccgggcaacatggtgaaacccgtctctactaaaatataaaatattagctggatatggcggcgcacgcctgtagtcccagcttccggaggctgaggcaggagaattgcttgaacctgggaggtggaggttgcagtgagctgagattgggccactgcactccagcctgggtgacagagcgagacttcgtccccccacctaaaaaaaaaaaaaattgcttggatctaagaaagcggtgggaaaaactgttaatgccaattaaacttaaaagtgaacagtatttatagctgttacattatgcatagcacagacaactgagaaaatagtcttctgatattcaaaaattattatctgattcagcaaagaagttgcttatgtcattgacaaacaagtgatgtaccgacatatgtcttatttcactttcatcttactccttaaatagaaatagcaatcagcatttatgtcagaagtatactaattgattgcaatcattggttggctgtagatataggacttcaacaaaaatcaacgtaaaccttttgttataaccaactggctatatgaaatttacaataaagaataccgtataccatatattttattactatttataagttatataatggattcttttttttttttttttttgagacggagtttcactcttgttgctcaggctagagtgcaatggcgtggtctctgctcactgcaacctccgcctcccgggttcaagcgattctcctgcctcagcctcccaagtagctgggattacaggcgtgagccactatgcccggcctaatgcattctttagcatcagtaaaatttataaaatgttgatatattaaataatacttctctacccaggtccagaaaaaaaggtaaaagccaaaaataattagataaataaatgttaaatatacaacattttttccagtctcctgataaatatttaccagcatccagcatactaagtgggcacaaggcaaccttttgggtgatggaaatgatctgtatattgactggactgatggtttcatggtatatacatttgttaaaattcattgaactatgcatttaaaatgtatgcattttattatatgtaaattatacctcagtaaatttgatttttttaaaaaacataaaattggccaggtgcggtggctcacgcctgtaatcctagcactttgggaggccgaggcgggtggatcacaaggtcagcagttcgagatcggcctgaccaacatactgaaaccgcctctctactaaaaacacaaaaattagccaggcgtgggggcaggcgcttgtaaccccagctactcaggaggctgaggcaggagaatctcttgaactcgggaggcggaggttgcagtggccaagatcacaccactgcactccagcctgggcgacaaagcaagactctgtctcaaaaaacaagaacaaaaacaaaaaaacaaacacgagaaaacgacaaccaaaaaaacataaaagtagggtcaaaggataagatgatgaagactccaattccacagtactttaaaaattatttggggtccaggcatgtggctcacgcctgtaaccccagcactttgggaggctgaggcgggcagatcgcttgagtttaagagtttcaagaccagcctggacaacatggtgaaaccccatgttgaaaccccatgtctaccaaaagtacaaaaattagccgggcacggtctcacgagcctgtaatcccagctactcaggaggctgaggcagaagaatcacttgaacctgggaggcagaggttgcagtgaaccaagatcgtgccactgcactccagcctgggcgacccagcgggactctgactcaaaaaaaaaggcggagggtgggggattacagtattttgtttgtttgtgtatttattttgaacttcatttaagcctagagaaggcaaaagtcacagacgcctccccgacaacccgccagctccacagccgacgcatggctgaagctctgggccctcagtcctggcaccagcatgcctctgtctctcatcttctgcagatacccaggagagctttcctctgttaaaataacagctgagattaatagcttttgcagtaattattggtgacagtaaaggaaatgtgtgatttgcactttttttttttttttggagacaggatctcactgtgtcacctaggcaagagtgcagtgacgcaaccatggctcactgcagcctcgacctcccagcgctcaagggatcctcctgcctcagcctcccaagtagctgagattacaggtgtgcaccaccatgcccagataatttttgtattttatttattttgtagagacagggtcttgcactgtcacccaggctggaatgtagtggcgcaaccactgctcactgcagctttgacctccccaagctcaagccatcttcccacctcagcccctccgaatagctgggattgactacaggcatgcaccaccatgcctggctaatttttgtattttttatttacttagttttttctgtagagacagtggtcccactatgttgcccaggctggtcttgaactcctgggctcaagcgatcctcctacctcatcctcccaaagtgctgggaccacaggcatgagccatcgcacctggcctgaatttgtgcttttaaaagcctctctaagtatttggtgaattttccacagagatgtccttctgcccttagctcttctgtgcaggaggtgaacaggaatgagcccattcactctggaggcatgtctttgccactgtctgagaacaaaagccaagtctgaaagttaaagtcacaaatatagagggaaagtcacatatctggacattgtgtcttaatgaagatcagcattcagggagcacttggaaacattaaaacctttattttttcatccagatatgttacaatatgttataatatgttacaatcacatcattctctttatatatgtacacgtctgtatatgatatatatgtcataatcatattgacctatatgatatatatcatatatacacgctttcatagcaagacaaatgcttaaggacaaattggttttacttatttttgtgaattaaaatcctaccactagacttgcctttagcaccctaagccaagtggcttatcagttatcagttaacaccagttaccaatcagcaggcacttatggagtagtgactacgtgtttataacgcccgcctttctgtaaagatgggcatttattgctttgtgtttctttaattgatgtaattaatcccggctcattgtttccaacctattcctcttcttggcccagctgaggaagtattaagttggtacaaaacc
